United States Patent Application Publication US 2026/0185093 A1 - sequence listing, part 4

SEQ ID NO: 2974 - protein, 390 aa, unidentified
  REGION 1..390: note = Table 20
MDFKAYLLRLRPSHAQKRMLERTLELCCEVYNYLLDEQIAYFLANGRIMSAYDLNALLPPLKKEHEEYNEVNARTLQNLSVRVYRSSVRWSSMTDRNGFYRLPRHKRKSRMRSFAYTAPEDFTIFRNSIRFSKMKKDESIRFKCNQHLRGEFRTCTVVRRKNSWLCYVGCNVPERPLPTEGPAGETVGADLGLHTLITLSDGKNFDRFIPEQKVMNQLENAQRRLSECPQDTPEYEKWYRRLINKHERIANKRNNYLRHVARYLAENYGTIAVEDIELPDLIHSEISRGLRRSQYNAGWGQLVKDLYQAAKSTGTSIVPVDPFCTSQLCCMCNAYVRKDLSVRTHECWNCGLVMDRDRNASFNVLRMAVGCTASDLIRKQREKPPCTILF

SEQ ID NO: 2975 - protein, 390 aa, unidentified
  REGION 1..390: note = Table 20
MEEGFRFRSVTYRLYPNSTQEAALKRSLDLCHELYNRLLGWSLDHYRNTGEKLSRYDLNRVMTRISASEPGMRSDVYSTCRQNVTGRVHRAMAGCRPGRTGVLIHVPRFKSSNRYHSFCYESPNGFGFKGDRLHLSKIGDVRYRNSHRPKGAEARTCTVKRDARGHWHAVIVFRVPDIKRNEEDLEHPRTPAAYDLGLRDLITDTDGNKVAVPDFYGSEKKDIAKLQRRMESSEEGSPMYERARRRLAILHGDIHRRRRGFLHRTAAGMVDGHTVVVMEDLEVRKMKERPDQGPATRDKYTEASWRSLIDMVGSKAEEAGIPLVLVDPGYTSRTCCRCGAVKDSLPLSERTFRCGCCGSSMDRDRNAAINILDRGLVMQTFRESENGRPC

SEQ ID NO: 2976 - protein, 392 aa, unidentified
  REGION 1..392: note = Table 20
MGRRGGGSEDRWFVTRVYPAYPNRTQERELLRQLDVARGVYNHFAEACIHCLIDGVHVPDPMEMNREFTLMRADDCMLRSVNSYTLRETIGRVWQAVERCERRSLADGELHVPRIKTPPRFRSICFDPRSSKMESNRIRLNRDLWVRCRNLAKPRNGRAVTVRAVRRGTGRWYICITYETDRVVRGEMDVGEPVRAEGYDLGLVDLITDSKGNKIRTPDFFREAEAELAHLRRQLSKLEEGTAKWLKKRRRIARIEERIRRRRDGYLDRVADWMVSGKTTVVVEDIDVRRLASREDGTLVRRKRFTEAAWATLVGKAERKAGKTDVRLIRVNPAYTTRTCSRCGHVGDGIPLSERMFRCPVCGLEMDRDRNAARNILGSGMGTRRYAAEPSG

SEQ ID NO: 2977 - protein, 433 aa, unidentified
  REGION 1..433: note = Table 20
MAVKGSMLTLELPLKPHPEQEKKLNLILSACRSVHNDLTDYCKDILKINQDIRARFLEDGPSWENDGLSVKPDYLPIPTGFDLSDMAGTIRNGTPWMKDAYAACVRKVGTDVGKNVARYLDDLKNGVKRGLPRWKPEERFDTFTYAASNQYHFCTDWLEGRCAPKIYLGGVGEVHFCNEERARCLPKMGILKQAIVKKERFHNKDSWKLIIYYDTVNPKQYMEIDLEDPCKEPVGIDIGARKTAVVSDGTVVENLCLNERKLKEKAKLQQKISNTEKDSPERRKYLGYLNHMNKHIKDAQDDMLHKATRRLALEHDIIIMEDLKVTDINNLDNNHKTHRTFSDARPGEFRRMLGYKAAEAGAKIIYVDPAYTSQTCSRCGERTDPGSSELFICSHCGHSLDRDLNASRNILRRGMGFAIQGTLSNAAIAEGHR

SEQ ID NO: 2978 - protein, 437 aa, unidentified
  REGION 1..437: note = Table 20
MPYRTVKIQLFPKPEQEKKLLLTLHACRATYNDLNGYCRDCIDRYSEWRESMGVEESEDASLYETDTNPRPRFPSEFELTTLAGEFREINLWRREAYSAAVWEVGHRIHRAYQRWFDSLVDDPSAGKPRFRTDGRYDSFTYTEYNQYRLDTQGLFKGKKPRMFLGGVGWVRSSDNGIIKRVPTDCMKQAVISRKKMGKSNKWYITIFCECLEIPDNRTWYMDAETPDPVGLDLGARRVATLTDGTVVENHRTMRKNEKKLARIQRKISKTEKGSEERRKYLGHMNHLLKRIGDSKNDLLQKATRSIVQNRTKIFVEDLSVKKLIELQDNKESRKLFRDASAGTFMRLLRYKGEETGSEIVAVNPAYTSRICTKCGKLNKPFSEETFRCRFCGFTKHRDDNACVNVLRRGMGFDILGKSSIAGITEAEAEVRKNVTGV

SEQ ID NO: 2979 - protein, 408 aa, unidentified
  REGION 1..408: note = Table 20
MTTVRSAVYKLYPTRQQEDLMDLFRKAVGYVQNSLVESCKSMLDEGVVIPTTFQLGAMARDIRRKTPWMEPVPVRILTDAAQRVKLSFEAYFKKSLPTARIPKVKSDAEMNSFTYTMNDAFRFASEKDGLDPSRFIRLGKIGFVRYRGKTQIKGKMKTATVSRRFEGARPSWYISITCEMREYEFKELALDNRPKGRIGIDLGLETRVATSEGLLVSVNRELSEYEKQISKLNSRMAGLDRNSAEYVKLKARRAHIYKKIRNKRADATHKLARQLALENDVLVMEDIPVGNIIDKSYSRERRKEIRDAAWDDLRSKLEYKCADSGCELISVNPAYTSQYCSVCGAFVEKDQTVRVHVCPRCGFVADRDINAAINILNKGLGLQAGSDPKHDESELEVQSSRDSTQNRE

SEQ ID NO: 2980 - protein, 430 aa, unidentified
  REGION 1..430: note = Table 20
MTISDKDYYVRTTQYSIYPNRTQERMILHTLDVCRSVYNQLCELCRMSLNGKEGIPSFIDLTAVARCIWNRFDWMQDIYENCLNDVARRVHDAFERYLNGRKRGENVGLPRFKSEGMYDSFTYPSSLGFSFRTKEGKKGGFERLRLGKIGQLRFGNRFMIPGTMKTATVSRSKSGSRNIWKVCITWRIRRFTEHEASIDPSEDNLAPVGLDLGLRNLVALSDRTIIPNDDTYRKKENRYRELQRRLSEAMENDPKYRRTDDFKRAHAKLSNAFRKAKDHRKDQYHKMARDIVYSHGDIYAEALDVKEMIEGSESKTMKKLYREAAWSTFMNMLTYKGEESGIVIHKVNPAYTSQLCSECGTMVPKDLSVRVHKCPDCRLKLDRDINAARNILKRGLGVARHVRDQRQSASVHDVSTDGSPTRFVEEPYFV

SEQ ID NO: 2981 - protein, 395 aa, unidentified
  REGION 1..395: note = Table 20
MTTSMRSVTYRLYPKREYEEKMLHFLDGLRRTYNHLVEMCRIYLGFRMGLPSEFDLMGMATRMRQEDPWLQDIHSHCFASVAKRVHEAFVSWMKMHSEGTGFPRFKNDMMFDSFTYTYKTDYGFVSKDCGSGMERIRLGMIGLVKYSNPYVMEGERKTATVFRRRVNDHYEWYVTVVYALEDLGEDIMYLDPSEGRDDVGLDLGLENLATMSDGTVIPNDRTYRRKEEELSALQRRLSGCEKGTAEYNRIHGKLSHKYKKLRNHRKDMFHKISRELSLRYADIVMEDLSVREMAADSPKGMRKSYRDAGWGIFTRMTCYKVEETGHRVVFVNPAYTSQICSSCGTLVPKDLSVRMHECPHCGLRMSRDRNAAINILNRGLGLQTGAGKCPKCYDG

SEQ ID NO: 2982 - protein, 384 aa, unidentified
  REGION 1..384: note = Table 20
MSRFRSVRYRLYPTRKQANLMGSALEGCRFVYNKEVEMCRKAYETCGRIFNRKDIDEYCEYVLKLDHPRLNEIHPDCISEVSNRVAQAFRKFESEMAGGLSPELPAFRGPDRYASFSFIKYGGNICLIGNRLRIISIGDVKCVAHRSFEGHPISCTISRSSTGKWFATISCVQQSIPCKPSADKGPVGIDLGLYNLAAFSDGTVYDNTKLFDRMASEMVKIQRKMSECDTDSDEFRKYKRRLCHLFEHYNNKMRDEMHKRSTEIVESYSMIALEDISVKELIHSYHTSTGRRNQYSSAWRMLVEMIEYKAVDSGVQVIFVDSRNTSQICSRCGYYVRKDLGVRVHSCPACGFCVDRDINAAMNILNRGLGMQASFSGKGNSQFS

SEQ ID NO: 2983 - protein, 392 aa, unidentified
  REGION 1..392: note = Table 20
MMKTLKMELEPTGIQRNTLDAHIDGLRYVYNAIITACKITYRNTGELPSKFDLYNLCTRFRNNVPFVKELHSTAVQYTVDCALQACRACLEYNIKKRKDSANDTDDSSSDVQAIGASHFPRYRKRGQIDTYGFLSNKYFDLVYEMNANGKMKRRLKLGKVKGTIRCYNQRTKLDGIPKTIRITRKDMGTHYRYFASISYEAVCRGDIHIGRPERTVGVDVGISNMAALSDGTIFPNDRIYSRKEKEIQRLGRRLSSAKSTQDVPKQKKIINHINHLYERIHNIRRNSIETISRDIVDNYDNICMEDLSVKGLKSISQNKGMRKSYDDASLGRLRTRIAYKAESAGRRIILVDPRDTSQICSGCGAYVHKDLSVRVHICPQCGLSIDRDINAA

SEQ ID NO: 2984 - protein, 461 aa, unidentified
  REGION 1..461: note = Table 20
MQTFSNYIVPTTSTFGHPHVRFIYPWNSGYDCMIVAVKMRIEPNSKQRRAIDAAIEVNRYAYNFFLTACKLVYESTGGLPSQFNLNNLATRFRHVFPGASDVHSSPLQNTASRALMASQQGIENARKSKKKIKSASMIIDDELNCAMHRPRHRNMGTYNSFSYPRYKSDYRFVQAKDSKGHAVRKLKLGKVPGEIRCYNQHSPINGILKRCTIKRVDIGTHYEYYACIDFERPDTGIISFDRDERWIGIDVGVVNIAALSDGTKYSAERVYASVSNELKSKTSKVGKSLPNSLKRKKARAKHIHAWNKISNHRKVAIENISRDIVDKADVIVMENLSIRGLRSKNSSKHMEHAYNDASLGMLRRRICDKAQGAGRRVLLVDPRGTSQICSNCGRDVRKDLSTRRHECPFCGFTADRDVNAAINILDRGWTGHPSPVIWENSSAPKCRRSTGESTSLFRASC

SEQ ID NO: 2985 - protein, 467 aa, unidentified
  REGION 1..467: note = Table 20
MCYKVLKMRIEPDSSQRKVIDDTIDYNRYVFNFLITANKLTYAKEERILSEFEMNNLCTKLRKRWPCFRKMHSMTHNDVSRRVRQACEKCRENAVRKRDRAVEKGTIPAGSPINMSWPRYRKQGRYDSYAHLSKRDFGLEYDVNKSGKRVRKLRLGKVKGLIRCYNQDTPLPGEPKTCIISRKDMGTHMEYYACISCEYTAPEPDEPSEPKAVGVDMGIRHMAATSDGKLYDHSNDMRNDLKKLKKLSQRLSRDRSDPVKERKARSKLRHHHRNMVNKRKENIERISKEMVDNNDIIVMEKLNVKKLWGKSLSKSMTRGFVNSSLGLLRNRIQSKAECAGKRIIEVNPKGTSQMCSQCGAEVKKKLNIRMHSCPFCGLAVDRDINAAINILHRGWTGHPVPAKDESPTAMIGGEARTETFADRSTGSLRCVKVRLIIGIVSSAEEKVCVNRCSKCSVIFLTLSAEKN

SEQ ID NO: 2986 - protein, 408 aa, unidentified
  REGION 1..408: note = Table 20
MGPEQGDDKEKGIYLTVKLKLDPSSEEKRRIDRNIEGNRVVYNQMVTYCKLHLENEGRLPTQFDLNKVGAEIWRKNPSVKCIYNNSMHVTSGRVLQAYRKILEHNSKPGEEGTVSSGHRPRYKTVKAARSYGYPKRQDFGFSEKGKRRYIRLGKVGNVRFYGPEFPKGTPKTCIISRVDMGTHSEYYASVTFEMPKGYATDELYPEIDTSQPVGIDLGISSVAVFSDGTVFENPKHYLKLRKRFEKLQRRLSKAVPFTEEYDKAKSRVDHAYRKLKNMRKNTVNHIAHDAVYLHGGIAMEDLSVKKLRSISRSRRMTNYYNDASLGAVQTRIRDVAACAHRKVVLVDPRGTSQICSACGAYVRKGLDVRIHHCPECGLRIDRDLNAAINILNRGWTGHPDPDRSNRPA

SEQ ID NO: 2987 - protein, 294 aa, unidentified
  REGION 1..294: note = Table 20
FGFLSHVNFELYDIDDDGVRKRYLNLRKIGDVRARNLQEFPPGAPKTCHIKRERKGGHFEYFATVNYEIEGRYEKDEISLEWYHRSPQGMDIGIAKVATLSDGTEYQNKNFQKEDRELAKLHRRLSKCPRNSPEFTKIREKISHHYAKIKNRRTNETNVISKEIVYNNGQIFAENLSVDQLREIAYSHNMRQQYNDANLGKLMRRVEKLSAAANRPIIYVSHEYSSQTCSNCGTLVSKKLEERIHHCPNCGLTLDRDQNAAINLLNWGLARNPSIMEKNSISCTWLEPSSEYTY

SEQ ID NO: 2988 - protein, 413 aa, unidentified
  REGION 1..413: note = Table 20
MTNGMYTAVRLTLDPNRAQKEFFDMMIGKLRYVYNACIYYLKHTYIHQDGRICSQFDLNRFCGDMWRRNMWLHTIYNNCMFETAARAKQAFEKCRDNSKKRKRDSGCRQFPRYRRLGQFTSFGYLSKTGFRIYDADDNGKLKRYVEMGKMPGRVRGRNMQEIIGTPKTLRIHVKDYGTHKAYYCSSSIELPEGYGEGIFDIEELLGLKERVPIGIDLGLGHVAFFSDGTVFDNPHTFAKEIEEFRKLSRKLTESKGTPREAKARSKMVHKYERNNNIKTELKNSIVNRAVYDHDLVFIEDLSLGQMRARAKGKAMIHSYNDASLGKIIDGLCRKSQKTQCSVVKVDPRNTSQLCSGCGAMVRKDLRERVHRCPKCGFTADRDFNASLNIRDRGLAGNPSSAIKGRITEPIVLA

SEQ ID NO: 2989 - protein, 414 aa, unidentified
  REGION 1..414: note = Table 20
MYRSLKMRIEPDSEQRKVIEASFRYHCYVYNALITACKSFYRSNGRLPSQFDLNKLCTRIWHNCPFLHRYLYQNAMNETAKRVLQAFAKCEENRRKRERRNRRKSKGKADKENAEVTTPPETGLACPRFRKPSRFHSYTNPLHMEAFTERNGRRTLKVSKIKGPVRCYNQKTPVPGVPKTCTIEKVDRGTHTEYYACLSCWDDIERRRGEEYLSEHSPDAVGIDMGVSKTATLSNGTVYGNDHMYSKLLDLFRKKHEAFSNMLPGTPGYRKARSRLIHLYGRLRGIRRNNVETISRQIVDAFDIICMEDLKVGKIRRKSRGKRMTNAYDDASLGMLRRRLIDKAIEAGRKIILVNPKWTSQVCCRCGACVRKGLEVRTHVCPECGLVMDRDLNSAINILIWGLTGNPFPERWDE

SEQ ID NO: 2990 - protein, 394 aa, unidentified
  REGION 1..394: note = Table 20
MYRSITFRIDPNSSQRRFIDDSIDINCYIYNGLLVAIKQFYGGEGRLPSQMELNRISTRMWNSNEWMHRTYQNVMNDTGKRVLQAVKSCNPGLEKKKNGAGPDPPLRSPRFKKPCRYRSFGYLSNRSFAVVTYADSNGRPKRGLKLGKMEGILRCYNQRTPLPGVPKTCTVGRRCTGDRMEYFATIQCEVEDVPIGDTDKAEATWIGIDIGISKVAVLSDGTVYDNQNMRKEFDDGIRELQRKLSKATPFTSEYNKLKGRIDRRYAKLVNRRRDFIEKVSKEIAEGYDTICMEDLSVKGLRRISLSPAMTNSYNDASLGLLTRRICDKAMGAGHRVVFIDPKDTTQECSDCGNIVQKGLKVRIHDCPHCGLVMDRDLNSAINVLNRGRLATPSG

SEQ ID NO: 2991 - protein, 370 aa, unidentified
  REGION 1..370: note = Table 20
MKRKTFKYRLYPNKSQAKKLNSGINACRFVWNNFLGERKNLYETEKKSISKFDQINRLPELKKEYPFLKDAYSQSLQHIGTALDLAFRAFFQRIKKGENPGYPRFKGVNRLSSINFTQYGRGCKIANGNLAVSKIGDIKMIYHRELTGNPKTARIKRTATGKWFVTIVCEYDPETLPVNFNSVGIDLGISKFATLSDGKVIENPRFLKVEEEELKKAQSKTDKLKKGSVERRKARKVVNRIYERLSWKRENFTHQESRKIVNEYQNIFLEKLEISSMVEDNEFKLSKSILDVAWNQFTSMIKYKAEEAGRNIVFVNPRNTSKICSRCGILVEKPLSQRTHSCKCGLIMDRDLNAAINILRLGTQSLKPLP

SEQ ID NO: 2992 - protein, 282 aa, unidentified
  REGION 1..282: note = Table 20
MRDACRQSHLEQRPLCQFRGADRGIFTAATWPDRGCQPGGGRADYPLSARKTPAFLKLVHSQALQNVCVRVDLTFKGFFRRVKAGEEPGYPRVKGYGRYDSFCYPQYGNGVRLAGRTLILSKLGNVKVKLHRDLCGTPKTVCLRRSSTGKWFVTFSCDCQPQHLSDELKRVGVDVGLSHFFTTSNGDQVDNPRFFRQEEKELAKAQRRMSKHEKGTPERRKRRNTSKQCSRCASIVDKELTLRIHNCPHCGLSLDRDQNAAINILALGLQRMGNLSLEAPGL

SEQ ID NO: 2993 - protein, 373 aa, unidentified
  REGION 1..373: note = Table 20
MFQYRIYPTKKQIKKLNETLEECRWLYNHLLEQRKTSYEQEGKSLSLYQQQDTFPALKQERPSLKQVHSQVLQNVAVRIDLAFKAFFRRIKAGEEPGYPRFRGAHRYDSFTFPQSGFSITRDDRVCLSKIGSVKMVYHRLAKGTIKTCTIHRASTGKWYVSFSVECEPERLPECAEQVGIDVGLKTFATLSTGEEIENPKFFRKEEKALAKVQRKHSKLVKGSPERRKHRKVVARVHERIKFRRDNFTHQNSHHIVAHSGIICVEDLRVNRMIHNHCLAKSIADASWSAFFSQLSCKAEEAGRTYVAVNPAYTSQTCSQCGHRQKMPLSVRVFDCPCCHVQLDRDLNASKNILALGLQGLGLSLEAPAIYPGE

SEQ ID NO: 2994 - protein, 380 aa, unidentified
  REGION 1..380: note = Table 20
MLRCFRYKLRPTKAQKKLLQKHLSDLCWLYNKCIETIKVAYEAQQPYPSRNGLNKLIKLWMVEKPELRNIHSQVLQNVCDRVDKAFKAFFRRVKAGETPGYPRFKSWQSYKSFTYPQSGFSLKDGILKLSKLGKLRVNYHRELRGIIKTCTLKRDAVGDYWVTFATEVDKEPLMPSTAVVGIDFGLKDLVTLDDGTKFPAPKYYRMLEKSLAKAQRKLSKLDKKSKAYIKQQIIVAKIHRKITNQRHNYTHQLSSYLVKNYGTIIHEDLDLRQLIAKNYAKSWHDAAVGLLTSQITYKAESAGRNCIGVNPAYTSQKCSSCGQLVPKDLSVRTHQCSCGYIADRDVNAAKNIKRLGLQSLKELGSTSLLLFRSPHLQVGV

SEQ ID NO: 2995 - protein, 409 aa, unidentified
  REGION 1..409: note = Table 20
MLKTYKYRIYPNQSERRLMDDTLETCRLLFNRILAVRRDAWKQEQKSLSTRDTQALLPAWKREDERLKQVYSQVLQNVNERVGIAFDRFFQKAGEGEAHGFPRFKSKNRCDSFCYPQHSYAFKTKDGQTKFGYAFSVGRESNTDYLYMAKIGRVKIVLHRPLPERIKTLTLKRSRTGKWFATFVCEVEPEIRLPTNRVVGIDLGLHTYAAFSDGTLIPNPRFFRQEEKVLAKAQRKYSVALQDCKAYWDKGEHPPLELQRERKRLGKVVCRIHERIANRRDDFCHQLSRDVVDGYDLIVLEALNPKGMSEGRNRGLNKSIRDAAWGKTCKFILSKAEEAGKECVQVNPRYTSQMCSGCGQRVPKDLSVRVHECPYCGLVIDRDVNAALNILALGLQGGGTESSETAIFG

SEQ ID NO: 2996 - protein, 367 aa, unidentified
  REGION 1..367: note = Table 20
MLRVYRFRLYPTPAQRRAMNRSLEACRWVYNKVLEVRKRAWEEGGESLSRFETIKMLPGWKQEQPSLNDAYSQVLQEVCTRVDLVFQAFLRRVKGGENPVYPRFKGEGGYRSFVYPQSGFKVSEDGKRLYLSKIGHVKIRLHRPLEGQVKRLRVWCDLLGRWYAAFVCDVEPRRLPSTIGIVGVALGSSHFATLSNGECIDTPPFFRRDARDLAKAECRLSRLEKGTSQYRRQERVVRHIRKRMFDRRTDFVHKLSRDLVEGFQIIVFGKLGMEGGERRDPLWRISDAAWSQLVHFTTYKAESAGRCVVVADPHDTAQECSRCHTGVSRDFCGPIHACPWCGLEIDRDLNAAINILARGLAHIASKS

SEQ ID NO: 2997 - protein, 407 aa, unidentified
  REGION 1..407: note = Table 20
MSRMLDLCRILYNSFLIDRRNHYKETGKTLSRDVHQSVLTQNKREMPFLATDIHSQPLQEVTRRVEKAYKKFFERLKAKNGRAGLPRLKPQNRYNSFTYTQSGFGINEDGKLELSKIGHVKIKLHRRIMGNIKQCEILRDGDLWYACFSVVVWDRFVYPKSTAQIGLDLGLSHRCILSNGDKEANPRTLKVYDKRIKKLSKSISTNNRTSKKNKYNLNKKKIRKKQGSKNWIEAVKKLQTTHRKVRNVRLDVIHKLTTELVKNFGFIAIEKLLVNNLVRNKHLSKSIYDVSWGKFTELLLYKAAEAGINVVQVNPKNTSKTCSKCWHIKEDLTLADRLFVCPHCGLEIDRDVNAAINILRLGLAQVQAQLIIGQELLEFTPGETGSAGYQNTGISNLSFEPGSSLIY

SEQ ID NO: 2998 - protein, 398 aa, unidentified
  REGION 1..398: note = Table 20
MKIKKAIKLRLYPSQDKQKQINQIREICLWLYNYLGKERIKAWKQSLSEGLKENKTKVTYTQQQNLLPQLKETNPDLKLVHSQTLQDVVRRLDYSWKKFYTKVKKEKVGLPRRKWLEKYESFTYTQSPAFQLKGSQLWISKLGWINIRKHREPMGEVKTCSLLIKNQKYYAVFSCEVEAQPKTTVSSISPQKQIGIDVGIGKDNFFALSNGVKQANPQFYRTAEKELGELQRKVSSKEKRSQRREKAKLELSKKHENVSNQRKDFVFKVVKKLRDNFDLLAVEKLRTRKIMERSQEQNPWYSAKSLHDASLSFFLLALSHRVEETGGRLVKVNPAYTSQRCSNCQQLASRKLELSDRVFVCACCKHKEDRDINAAKNILYQAQITELGTNFDSQNKIW

SEQ ID NO: 2999 - protein, 406 aa, unidentified
  REGION 1..406: note = Table 20
QEYPRLLQVGDELLTKNLIMKKTFKYRLYPNKQQKEKINQTLETCRILYNEFLAERKEAYEQEQRKITCFEQINSLPSRKETNPFLGEVFSQILQDIARRVHKNFLAFFRRLKTQAENGVSAKQKAGYPRFKSKFRYDNFTYPQHGFKLINGQQIYFSQMGNINIRKHRELLGEVKTCSIIVKNNKYYACFSCEVETRPLPKTGKKVGIDLGLTSFLATSDGKLHQAPKTYKKVEKRLGEIQRIVSKRKKGSKRRKKAVSKLSVKHEKVANQRKDIVHKLSRKLVENYDFIAYEKLEIKEMIEKSPYRSLTKGINDAGWGLFVNILLSKVAETGKVGKPVEPKNTTQMCSDCHNLAPIKLDLSVREYNCYYCSYQENRDINAAKNVLWKATTELGTNSEIQAHASP

SEQ ID NO: 3000 - protein, 410 aa, unidentified
  REGION 1..410: note = Table 20
MKHLKERQSLVGNQNILTKTYQGKLKPISETKRQLQLISKGCNEVYNYFLKKRIKADKKNQPQPTSEEQQKDLVKLKKTKKYQWLNKIPAWTLQEVVKNRLPDAWKKYKEYKAINTKAKYPREKSSNRWYDSFSIHQEGYQIKDNQLILSQGNYKGKRQSKIIIPFELTNSLKGKPTIITISWKKDQWKINLTCDIKVPPQIPKTEIKRMNGVDRNVRKLFANSDGWKFTNPYYWEKVEKEYIEFQKSLSRKVKGSNNWKKVKDKMKRLCQKTSNQMKDVCHKTSRKLVNKNDLLAYEKLNTAEMVKKIDKKGKKRKIWKWTADGMMKACWTQQVQFATYKVKETGKWIEFVNPHNTSKRCSKCGKINEKLRDEEIFVCPHCDNVLDRDVNAAKNILWKAQIKLGLTPTG

SEQ ID NO: 3001 - protein, 194 aa, unidentified
  REGION 1..194: note = Table 20
MAYLTKTIQALNKRIECDKTGLKQPHKHQQEKELTKLKKQKKYKWLSKICAATLNETVKNRKIKKIKALQKSLSRKKHKRSESDAIKPSNNFLKTKAKYKRLCETISNRVKDRNHKLSRKLVNKYDLIAFEKLETSKMETGKWCELVNAYNTSKRCYRCGEINKELKDKEIFICPNPKCDNVLDRDVNASLNIL

SEQ ID NO: 3002 - protein, 672 aa, unidentified
  REGION 1..672: note = Table 20
MAVEKKVSKIKTKTTKPKKIKKVSEGRGIIHGKFSFNNTILGLSKENGDTLATVSAGSVDLGNNKKVTGTKKATPFMAEKALEAIIRKANEFGIHVVTVKVKKLGSSRDTVIRRILEEKSLDVEALIDRTPIRHGEKVQKNKPHTSSFVFHHLPEGIGIVLGNYFRQFLLKYTSSIAPLGARISHREGVVESEMSILPGVVDTVATSFLIMNLKEVRVEAKKKEGVFWLELNVENKEKKEKKITAADFQKDKEIKIKNPNLHLATLAAATDEGKNPKLEEEEQEKNYLADEENVIAFSTDYAPVKGDGVSFQIKSVVIGREKTEEELMLTITTNGVVEPKGALQEVLAISQDAFDAILYEKVETSLPMARSLTKLLAKLIGYAKQDNLHARRLALKHLVNKKKNVDRQGKKMLDKLFSDLKERYKDRAGGYSRITKLNYRLGDNNLRVIFALGPKENILTKTYQGNLKTSSEAKQQLQFISKGCNEVYNYFLRKRIKADKKNQPQPTSEEQQKDLEQWKINLTSDIEIPPQISKSAIKRMNGVDRGERKLFANSEEKVEEKYIELQQDLSKKIKGSEKASNRMNDICHKISRKLVNKNDLLAYEELKPKEMISKENTKETGKWIVFVNPHNTSKRCSKCGEINEKLKDEEIFECSRCDNELDRDVNAARNIL

SEQ ID NO: 3003 - protein, 199 aa, unidentified
  REGION 1..199: note = Table 20
MNYLTKTIQGYIKPNQTIKQQLNLISKGLEPKPTIKTGREIGIDRGVKKLFATSEGEEQLIKLQRELSRKKQGSKNYQEKKLELARKHEKISNRMKDRNHKLSRKLVNKFDLIGLEDLKTQFLSYKVKETGKEVIVVNPKNTTQRCSQCGKLTNPKIERDVEIYNCFCGLILDRDVNAAKNILYLAQNNRLGTLPTELV

SEQ ID NO: 3004 - protein, 419 aa, unidentified
  REGION 1..419: note = Table 20
MRKTIQGIIYPNREIRKILETISHGCQKVYNHFIGERKKYDKNKQKQPSKYEQKRQLKEFKDANPKLKSIQSQILQEVVRVKVPNAWQKYQEHKRINSQAKYPRTKTGKGWYSGFSYPQPIVNGVWVFKIENNNLIIKQGSAVKKSERELKIPLKLNQPIQGEIKTLTISWKNWDKMLVSFTCEIKEKPKMPLSEVEEARGGDRGSINLVADNKGWKVPNPKYWKKEEELITELKRALSKKQQPRFKGDKVKFSKNHGKAKRKLVKECQRLTNRVKDRNHKLTRRIIDKFDLIIYEDLKLKKMVEKKNAKGKKRKISKYTAKGLQEVSLFQITNFTIYKAKEAGKWVYFVNPMNTSKRCFGCGTINKELDKERWFACVNPNCDYENDRDVNAAKNILYRGITELGTGNGRLSPLLLERV

SEQ ID NO: 3005 - protein, 443 aa, unidentified
  REGION 1..443: note = Table 20
MEKELGNSAEIKLVSPSVVRVIQEGGEVSEDLKKAKIIFFPINNSEQHETAGAGSHWTLLALHKEGKILGGYHYNSLGSSITDNGKKLTDNFRQKLSINEENNLIYPAKNTPQQVNGADCGVYVIAFTRALVKRFREELKNTSKIKDKMKKTIQGQIHPNQEIRKTLEAISRGCQKVYNYFIGERKKCDKSKQKQPSKYEQKRQLKKFKDDNPKLKDIQSQILQEIVRVKVPNAWKKYEEYKRINPKAKYPRTKTDKGAKVKQSERELKIPLELNQPIQGENEVSAKQIKTLTIAWKDQTKMLVSFTCEVEAKSQILLTKIKRMAGIDRNVRKLFANSEGWKYKNPKYWKKVEKKYIELQKSLSRKVKGNVCHKTTRKLVNKNDLLAYEKLEPSEMVQDEKETELKSEKIFECPHCDNFLDRDVNAAKNILWKAQIELDLPTG

SEQ ID NO: 3006 - protein, 406 aa, unidentified
  REGION 1..406: note = Table 20
MPKKIEQPLKTYKVNISPSKEVIKTFEWISEKCRGLYNHFLEIRIERNKNKEKQPTWQEQVKLVRQLKEKEPELYRIFSQVLQDIPRRRVAETWQNYKQYKKINPRAKYPREKSEKRWYDTFTYPQFGFKMENNQLILSQGRGEKELRINLNLHRPIKGKIKTLTITWKNNKYFACFSCETKHKLQMPLSEIKRKVGIDRGVINLLATSEGWKYANPRFFKKGAERLTKLYQAMSRKQHKRFKEDNIENSKGFERAKSKLAQEFKKISNRMKDRNHKLSRKLVNVFDLIAYEDLKLKKMSEKKPNQKRKINKYTVKSLQQASLRMLGDFTTYKVKETGKWIVFVDPKDTSQTCSKCHQKSLIKQELNDRIFICAFCQNELDRDINSAKNILWKAQTELGTLSSERI

SEQ ID NO: 3007 - protein, 310 aa, unidentified
  REGION 1..310: note = Table 20
MKECRQLYNYFLEIRRERDQNKQKQPTKQEQTNLLLKLKEEKPQLKNIFSQVLQNIPYHRVNETWKKYREKKKIDFKVGYPRFKLKGWYDSFTYPQFGFKLEKGQLLLIEPQLLPKTGKVVGIDMGITSFCATSDKKLYDKERKHYKKAEKRIIKSQRRLSRRTKDSNEQFVNQRKHETYQVVNDLMKNYDVIAREDLKIKNMLKNHCLAKKITNAMEETGKKVVKVNPRNTSQICSECDKQREPKLKLSQKKFNCFHCGYKENRDINASRNILKNACEEGCGTNLWGAVSMEAVKNHEFSTEKLPSSNP

SEQ ID NO: 3008 - protein, 366 aa, unidentified
  REGION 1..366: note = Table 20
MLKKCFQYRLNLKARAEQELDQILTKNEQEKLLTELKERRPQLHLIFSQVLQNVANRLKGDKLILSCGREKEELFLNVRLHRELEGKIKILSLVRKNGKYYACFANEVEKKLSPKTNKKVGIDLGLIDFCVLDNGKKYPNPRIYKKGIKKLIEAQKRVDRKEKGMEETGGQLVKVNSAYTSQTCSFCDEPAKEKVELSQRVYECWNCGKKLDRDVNSARNILKLAEPRFDGVIHVPVMLKEVLDHLNLKKGGIYVDGTFDKEFSNLTQKDKIFFAPRFCLINDNFANFEEHLKKMGVQEVDGFLFDLGLSSDQLTATERGFSYRSDSPLDMRISQTTKLSATDIINNYPEAKLADIFYHYGEEKKA

SEQ ID NO: 3009 - protein, 399 aa, unidentified
  REGION 1..399: note = Table 20
MKIIKSFQYYIKTNTTNKKQLENILFGCSFLYNELLKDKIKRDKDKSRQLTLSEQSKLLTKLRKEKECLQITNRQILNEVIIRVNKTWNNHFRFRKLGLAKGYPKIKQASRYNSFVGTNNQNWKLENDKLVLSQSWIKGKGGSDKITLKVFWSRPIEGDIQTLVIARKSGRWYANFICEVEIQPREMTGKCAGMDLNLKKNSFCVLSDGTRFNHPLTHKKNEKRLTKLQQLLSKKQKGSKNREKTRLLYSKQWEKVKNQQKDTFFKMANEFKDYDGIARENLKIINMIKNRSLSKAIVRASWANFVSILAHRVEDTGGQVVKVNPYNTTQRCSNCKELTKEKLTLKNRVFYCWNCGLELDRDVNSARNILDKAIENNRFGQNLWRGSEGIAYSDRIILV

SEQ ID NO: 3010 - protein, 1352 aa, unidentified
  REGION 1..1352: note = Table 20
MKRTYKYYLKINKAQKQKFNKTLELCCWLHNFLLEQFKERDKNNQKQPTEYQLINSLLEIKKNYPFLKQIHKLKNLNLKKKYPKPKLIHRYNSFVYPLSIKRSDCGYKIDNSPLSKKKETRKLKLTLGRQNNHNSYLELKMVMERNFEGSAKTLTIKHKNRRYYALFSCDELKARPLPKIDKKVGIDLNLEQKSYITLSDGTRYKHPKHYKKMEKELVSRSKILSRKVKKSNNWLQSKFQLAKKWEKMVNQFKYYSRQVIKEIVGGYSKIAVENLNINDMVRDNKLSKHIYQARWGILFKVLAEEAEIATRQLVRVNPYNTSQICSFCGELAKKKLDLKQRLFKCWCCNFELDRDVNSARNILNRAILENRFDQHLPLNKEDIYEKKLAHIRNIGIMAHIDAGKTTTTERILYQSGKIRSIGEVHDKEGKGATMDFMDQERERGITIQSAATTVYWQEHQINIIDTPGHVDFTAEVERSLRVLDGGIVVLDGKKGVEAQTETVWRQAKKYKIPRLIFINKMDGVDNVEKFTENLKSIREKLHANPLPVQFPIGAGRELEGVVDIIEQKAYYCQMGDKEEKYQIKDIPPNLLEKAKKYRQELLEKIIEQDEELAMKYLEGGELSVAEIKKILRQATLTGKYFPVFCGSAYKHVGVKLLLDGVVDYLPSPLDIEDIPVFSPQEKSQKGVVNCNSPLSCLALAFKIVFDEYNNKLTFFRVYAGKIPANSYIYNVSRDEEERVSRLVQMHANEKRDVKEVGAGNIAVAIGLKHAITGDTFGDKKNPLLLEAISFAEPVISQAIEPKTNEDKDKLRDALEKLKIQDPSFKYWIDRETGQMVIAGMGELHLEITVERLRREYKLNIESKQRKVSYRETITKKLGEVGHFARVKLAFEPNPGKGFEFVDAKKGQEMSNKDAEEVREGMEEAMSSGLLLNYPLLDVKVTLLEGKRHMVDTKPGDFKNAAVLAFQGDGAAEKEKRIQELGVVLLEPIMQLEVVVPKDYMGDVLANLGSRRTLIENTEEKEGESYITGKTPLKEILNYSTILRQLTKGRGTYSMHLSHYQEVPKDTLEEILKEEKFEEFERIYRDLLENQPFPNKADKDQFVEVGALTTHYTKRGVIAAILAGLVGFEAIDLQDNSATALLNGLTYGEWKKKLTQRIREHCIANGYYNPNSPPDLTLLKTRKKKVKEALEDTNRRYKLLVYADSEDYQIITSALNYFEQLEKFKPANDDGGDDDIPREIDFLVEDHVGRVEKLINKLEQTEKPNGSSQPTDNSPIPPKPTQQKNNLEKEIQRLRDQVKELEGKINNTTDTTQKAAYQSMLDSIKKDIENKEKEKDKLNSQEKPAKPDNNKLN

SEQ ID NO: 3011 - protein, 307 aa, unidentified
  REGION 1..307: note = Table 20
MERNFQGEVKTLTVKRKTGRYYVLFSCNGIEARPLPKTAESVGIDVNLNRQSYLTLSNGIKYKHPQHYKKVEKVLEEAKLQLAKKWEKVVNQFKYFSRQVANELVRDYDRIAIENLKIESMVKNKILSKSIQQARWGILFQVISEAAEIATRRLVRVNPYNTTQRCSSCGELEPKLTLTVSLNSHLFKRLKSEIEPRQVSGFVEKAIAKELGAHDQQLEREQQKFVKKLIDGYQSNNWQNQYNDYSVVAPLTSEKEELQHIEVFEVLIEANKENGLDKKSKILLHRLLAIDKEERLIKKLGQVDSKI

SEQ ID NO: 3012 - protein, 414 aa, unidentified
  REGION 1..414: note = Table 20
MKRAFKYKLINLGKRNQSIIDKHLKICCWLHNYLLKHLRKKDKNGEKKIIEYQLVKLITEIKKERPFLKEVHSTTLQEIAKQVYKIWNHNEELKKLDSKKGYPNFKPLHRYNSLIYPQSIDKSSCGYKIDNSPLFKKRENRELKLTLGRQEKNVYLTVRIRMERSFQGNCKTLTIKRKNSKFYALFSCENIPLKILPLTGKKVGVDVNLEKKSYITLSNGKKYKHPNFYKKSEKGIKEASRNLSKKVEGSQNWKEAKLQLAKKWEKMVNQFKHEVHQITNELVRNYDEMAIENLKIRNMVRNRNLSKSIQQARWGILFKSIAEKTEIVARQFIRVNPHNTSQTCSNCNNLAEEKLELSNRTFYCQYCQFELDRDINSARNILNRAEGVWLKPSLEMGGEKLTASPIERGKYLLK

SEQ ID NO: 3013 - protein, 178 aa, unidentified
  REGION 1..178: note = Table 20
MERSFQGNCKTLTIKRKNSKFYALFSCENIPLKILPLTGKKVGVDVNLEKKSYITLSNGKKYKHPNFYKKSEKGIKEAKKMVNQFKHEVHQITNELVRNYDEMAIENLKIRNMKTEIVARQFIRVNPHNTSQTCSNCNNLAEEKLELSNRTFYCQYCQFELDRDVNSARNILNRAEWV

SEQ ID NO: 3014 - protein, 802 aa, unidentified
  REGION 1..802: note = Table 20
MSFDCHPIRELNNRKLERDQKREKQPTEYQLINSLPQIKKEHEFLKEVHSTNLQEVAKQKLKALNPKKKYPNFKPHHRYHSLTYSQPIDHIRGCGYKLNNSLLNKKKEVRKLKLALGQQNHHNVYLEMKLTMERNFEGNAKTLAVKRKNDRYYALFICDNIPLKQLPKTNQNIGIDVNLNKKSFITLSNGKKYKHPQHYKRFERRIKEADRNLSNKIQVANELVKDYDNIVIEDLKITNMIKKCNLAKSIQQARWGVLFKAISDKTEIVGRRLVKVSPYNTTQTCSDCGEIVINKVKLNQRMFKCFSCRFELDRDINSARNVLNRAKYEFDQSSPPQMSQVETKFEKSYGVRPSYFIPNPAVQEVCRTSQLADRIQYETIQAVDYAYDTKPLSYSQQKKPIVTGNKPFSLIEIEDGDFTVIEAEQLNKLNGYPTHTRQEQITGDELNYQKVNFADEDDLVKVDYHFDRKEYQAEKVKESENLEIKLNQRIFKCFSCEFELDRDINSARNVLNRAIAENRPNTRLVRKERDITKTEINYKRDIAIAEIRYKANMAKKKLDLEAIKREMKHEVELSSFRAGLKRKEDNEAFSEATNFIDNLQNKGKEQADKAVKNVKDNIKDKISSKENFVNGIYKGGLNKEEFINYIEEIFGSKNLQNGKYKGGKEAALEVINELFGKENIKDEQDLKNIKASFGGEQNFNEQNIYKTEEITSEIIEKKFGGKEKFQNGIYESKPEIVKAVVEELRAKGEILKEVHNIFGSGEFYPIEGGEGVPQGREGCRKNAEEIAMMQAQEQKKIRAIEE

SEQ ID NO: 3015 - protein, 626 aa, unidentified
  REGION 1..626: note = Table 20
MSRIYTCKHQNKSKNPYLKDKKCPKCGKASTEMSSTLIDTPIHDNSFTKFCEKCLGPKTSEDIHECKSNNLNNYIRETVNKAEKNNNNRQDNTDKNALPQRMFSNFKKAVRGELELVEPHIMHSNNVEVILNKVQTLESMGIIELQKPSENADMRQIKPPMVNTNCNICIKKVFLTKQEFLQAHGSKIDFIPVSFRERDKSKQKQLTEYQLINSIPQTKKDNPIFKQLYSTTLQEIAKQLDNSPLAKKKETRELKLSLGRGNNSITVKIVMERNLQGNVRILTIKRKNSRYYACFSCDNIQPQLLPNTNQNIGIDVNLNKKSYITLSNGVKYKHPQHYKKVEKKLIETQKKLKKVVNQSKHYFYQAANDLVKNYDGIAIEDLKIKNIVRNHNLAKSIQQARNTTQRCSDCGNLAKGKVKLSQRLYQCFNCNLKLDRDVNSAKNILNLGFDQSPPLGIKLKLPKKQEQHLTYLETISKRSKEFIIKEALIQYLKYAEDVAEAYAEERKKGAKDCTTEDMLEEINLKEINVQNKIPLLEQENKQIKVQLTKQKVLLEQLLASYEEENHINEIKEFCQQKGINYELYSSSLDYSQLHKITNCQIANNKITVVLEDRREISLPLDLVIKE

SEQ ID NO: 3016 - protein, 398 aa, unidentified
  REGION 1..398: note = Table 20
MAIRKYEYRLYPDKKQIRRLEEQIRIGTEVYNRLLTIYKEEYLEKGIKIRKYDLEYHVTSLRKENVAYGAMYRITLTSIAKRISRGLDYYFRQMSEWKEGKARKPGLPRYKKSLRSIEFAPLSVKIIDDKTVKIGRIGKIEAVVHRETEGEIKEVTVIRKPSGKWHIIFTCDIPDEIVERTAGGEIGIDMGVLSFATLSDGTKIENPRFLAKSEKRIRRLHKDLSRKVKGSNNWMRTKDLIASAYETVENQRNDFLHKTSRALVDEYRLIAVESLGISRMIVGQRTAKSISDVSWYKFRRMLEYKASSAGTQVIFDKPFSPTSKTCSACGNIIEMPLSERTFVCPSCGLTIDRDINAAINILNNCRAGSARIDACGDGSSTSLIREKRVLSLNQELYV

SEQ ID NO: 3017 - protein, 374 aa, unidentified
  REGION 1..374: note = Table 20
MKMYRFRLYPSKRQEKQMNTHLWLAKNLWNDLLEHSKNIYRSFDKFPSRDALQGMTKDSGMFSQTAQEIAHRVEKGIWRYVKLRKAGDKKAGFPRFKSMDRMKSLNYPQFGFSLNRKLKVAPFGEISLVQHRQINGRIKTLSLKKEASGKWFACFTVEETPFIKVQNGKSKIGIDLGLKTLATISDGTIIKNPRHLKKHADHLARLQQLLSRKEKGSRNWWKAKKKVALVHEKVANTRADFLHKTTTNLVNAYSLIALEKLSSQDISEENFGKSINDAGWGMFANMLVYKAESAGCQVMFVDPKNTTQECSSCHEIVKKDLSIRVHDCPCGLVMDRDLNAAHNILIRATAGHAGSNASEDGTMVPSVKEETRTL

SEQ ID NO: 3018 - protein, 250 aa, unidentified
  REGION 1..250: note = Table 20
KRAAGKYYAIFTTVKGIEQRKIKDINPVGIDLGLDSFITMSDGTKVEKPKFVKRAEKHIAKWQRRIARRHKGSKRREKVKSKLQKKWEYVTNQSNDFAHKLSHKLVNSGYTSFAVEKLGVNNMVKNHRLAQSIQNASWNRFINMLSYKAESAGMKVIRVDARDTTQECSSCHYIKKGEERLTLEDRTYHCNVCGMAMDRDVNASINILHRATTLGQRGSHAQGESVRPQREAVLEELRTYPVNNRGSLGL

SEQ ID NO: 3019 - protein, 415 aa, unidentified
  REGION 1..415: note = Table 20
MRANRRIARRIKFNCVDNMVILKKTYRYRAYPSQSQKSALNRQMYLSKQIYNLLLEQSQKHFKETGKAFTKYDMNKWITKLKKKNPEFNELYSQVCQNIADRVSKAYQNFFRRIKERKHGKKIKVGFPRSKSYISSLTYPQSGFKPEKKKVFISKIGRINFVNHRDMEGKIKTMAIKQTKSQEWYITFSVENGETPLFSNNKPQVGIDLGLKEYATMSDGTKIPNPRISNKSIDKLKMIQRRLSNKNRGSKNRRRAKIKLARISGHIARQRDDFLHKTSHHLVNSYSLIAYEELKIANMMKNHHLARQITDVSWGNFIQYLCYKAESAGCRVVGVNPKNTSRTCSDCGNIQDIELSERTFLCQKCGMSKDRDLNASINILTTAGLAGSNASGDVVRPQLQEAAVVESGTILGGSR

SEQ ID NO: 3020 - protein, 398 aa, unidentified
  REGION 1..398: note = Table 20
MLTFKYRIYPTKKQALHLNRQMQLAKELYNLLLEKSKEHYKETGRTFSQFDMNRHILQLKKERPKLKELHSQVAQNISKRISDAYKAFFGRIKEKKNGRKINAGFPRPKKFVRSLTFPQSGYKFRNERRLYISGIGNVPIVLHRLLKGKVKNCTIKLYPSGKWYAGFSEEILKTEFESNHKGEVGIDVGLANFATLSDGEKVESPKFLRELEERLKFIHRRVSRKKKGSSRRRKARFRLAKKYEKVENQRSDFLHKLSKKHVDSYSRIAVEELNVKNMVRNHQLAKSIMDASWSAYRKMLHYKAWSAGCEVIDVAPADTTKICSKCGNRKDMPMSERTYRCSFCGHAEDRDINAAKNILTRAMDGLSKSHARGDMSSVSLETRTQGISLKRELYGVET

SEQ ID NO: 3021 - protein, 406 aa, unidentified
  REGION 1..406: note = Table 20
MELRSYNFRLYPSKKQKGRLFSQFNLCCELYNILLERCKTTYKTKKVSLHSRTSLNNIIKEAKTSDSKFTSAHSQVLQNCSDRLSKAYTNFFRRVKEKKQGKGVKTGFPRFKKRVKSITYPQSGFKLLSDKRLHISKVGNIPFILHRLPRGKIKTLTIKRNRAGQWFAAFSCEVESSKRTHPHPDTKVGIDVGIENFATLSNGEAISNPRFLVESERKLKKLQRRLSRKKKGSANRGKAIYKVAKCHIHIANQRTDFLHQTSNIITKRYGFIGVETLNINGMLKNHCLAKHIVDASWGKFLDMLSYKAESAGGQFVKDKPFAPTSQTCPKCDRRVPKKLSDRVHKCKCGYVVHRDVASANVILNDTAGRAGISDACGDLTSTFGYNGPSASRVAEAGTTCDSPQLH

SEQ ID NO: 3022 - protein, 400 aa, unidentified
  REGION 1..400: note = Table 20
MIRNYEYRLYPSRKQLDKLYSTFRLCSELYNLLLAEHEAAYEQTGVSLTWYDLNNLITNVKRHDARFKSVYSLVLQDQADRLSKAFSNFYRRCHEKKQGKCVKVGYPRYKKLIHSITYPQNNGAFKVVGNKLKVSRIGKIPIVLHRPIIGTMKALTIKRNRAGQWFAVFCCEIENQEPKLHPGPTVGLDQGLNHIVVEADGTVIEPPKFLRKSEKRLAKEQRKLSRKEKGSNNRRRQRHKVARVHLKIANQRGDFLHQLSRELAEKYSVIVIEELQIHNMVKNHSIAKSFYDAGLSSFISMLEHKVSETGARLIKVSAAYTTQTCSRCGHVKEGDEKLGLGDREYRCSCCGLVIDRDLNASMNIHRAGQARIHACGDDVRPSLSKAVVAEPGTTRSGGLA

SEQ ID NO: 3023 - protein, 405 aa, unidentified
  REGION 1..405: note = Table 20
MKKSYKFRIYPIRKQEKRLETALDQSCFLYNQLLDIHHQIYLGEGKTLSNFDMCNLVKDFETKQLHSQVKQNIPKRISDAFNHFFRRIKNGETPGFPKFKKRVFYSSITFPQYKQEIIGDRLHVSKIGMIRIVKHREIEGYIKTLTIKKEGSEWYASFSCENVPIEQPLVEFESDVEGLDVGIKKFLVCSDKREFDNPKFLSRSEKKLKRLSRRHSKKKKGSNNRKKARIRLNIQHTKIKRQREDFHKKLARRLASEIKYIGVEDLSIQGMVRNHRLAKSINDVGWGSFFSYLKYYKTIFGGKIIEIGRFEPTSQTCSTCGHKQVMPLAKRIFECEDCGLIIDRDLNASINIKKLVIKKINNTEGHSGFQACGDTVRACFEFEKIQDNASVYEAGNYREISRRSP

SEQ ID NO: 3024 - protein, 404 aa, unidentified
  REGION 1..404: note = Table 20
MVHQKIFKFRLYPSNEQRQMIEKQMNLLCYVYNKLLEMKREQYKQNKKSLSEYDMNKLIRQITNTKDVHSQSLQNLSKRISEGYKLFFALRKQGIKKAGLPRFKKMENYKSITYPQPQSLFKDNKLIVPKVGLVEIRQHRKLLGKTKMLTIKKMPTGKWFACFVQNCDGKYDVLPKTGKVVGIDLGLNNFIATSDNEMFEHPKPLARLEKRRKMLNKRFSKKKRGSSNKNNARIKLARIDEKISNIRENYNWKVANYLVNNYDGICIEDLQIKNMMQNHHLAKAITDVSWGDFVGKLSYKAESAGRKLVKINPRNTSQECHNCGAIVKKELWNRTHKCTCGIEIDRDINSAKLILNKGLLPEWQDVKPAEMIPLQTTHRKIGLQELSRKQEDSSAMAIGSHLTC

SEQ ID NO: 3025 - protein, 410 aa, unidentified
  REGION 1..410: note = Table 20
MGVMKAYRYRVYPSKAQATEIDKQIEFCRKTFNELLALKKLAHNQYNANLGRKHLYSEVKGTKETHSQVVQNVADRVDKGFRNFFRRVKENARKKGFPRYKKFGANRSITMPQVNNPENIGKKTFFPKVGWLNTKYHREITGNAKTLTIKKAKTGKYFATVVCANPTDNKKTTTDKEVGLDLGLNYFIATSDNEFVEHPKPLKYFAKKRKRLNRNFSKTMKQSKNRNKKRVKIAVVDERIINIRDDFAWKLSNDLVKRYGFICVEDLNIKNMVKNHCLAKSINDVSWGNFLEKLGYVAESAGGRVVKLQNPAGFCNIQKSLVSESVNPRNTSQRCSNCGEIVKKSLAVRTHKCNCGLVLDRDTNASLNILKLGQELSESKPVGDNTSTVCCTSKQQVFSMNQEAPSIRAG

SEQ ID NO: 3026 - protein, 383 aa, unidentified
  REGION 1..383: note = Table 20
MRAFRYRLYPSKMQTKTIDMAIENCRQLYNQMLSLKVEKYKDDKTSLKRNDLYSLVKGNRLMYSQVSQNVGERVSSVFNHFFKTKGGFPRFKKYGRYRSITYPQAKEKWIGNKLRLPMIGDISMKYHRPVEGKPKTMTVKKMPSGKYFATICCETTREKTVDRFLDKKIGIDLGLNHFIATSDGRFFEHPKPLKKLEEKRKLLSKRLSRKQGTFNKGKARVKLARLYERITYIRQDYSWKLVNYLTRNYGTVFFEDLRIKNMLKNHSLAKSIADVSWGDFVQKLLFKAESAGTKAIKVNPRNTSQICSNCGKMNTMALSDRVYKCGCGLFVDRDYNSAMVILLRGIGSERSESTPLEMEPLLSKKASAVSELGSLNFDGKQFT

SEQ ID NO: 3027 - protein, 395 aa, unidentified
  REGION 1..395: note = Table 20
MNRMFKYRLYPSKVQQKTIDRHLELCRRMYNELLAIKIETYEQTGVSLSKYQLTTCVPHLKNEKPEYKEVYGQTVRMAADRIDKAFKSMFRRIKAGEKAGFPRFKGKNAVKSLCYPQNGQGAFHLKQKGKLRASKIGSMNIKLHRPLEGKIKNLIIKKTPTNKYYAFFCCEVEIEPRQRAYKKAIGLDVGLKSFLATSEGQFVSSPEYYRKSEQRLVMLQRRFSRKKKGSKNRTKARFIVAMHHEHTANQRTDFLHKLSSNLTYDYSFIAVEDLNIQGMTKNHCLAKSISDAGWGTFITQLQYKAEQAGGVVSKVNRFFPSSKTCSSCGAIQDMPLKKRTYKCGECGLKIDRDTNAAKNILNSSLERTDGMSGINACGDVGLPTPMKQEAHQIGG

SEQ ID NO: 3028 - protein, 401 aa, unidentified
  REGION 1..401: note = Table 20
MAKQVFKKTYKYRLYPTKKQQEILEKHLSLCRWLYNHFLDERRTLYQKKKIKVFCYDQIKKILELKKEKPELNNVYSQILQDVVKRLDKAFQNFFRRVKENKNGKKQKVGYPRFKGYWRYDSFIYPQFGFELRDDKLNLSKIGSIKLKLHRLLEGTPKTLTVRRTRTNKWYACFSVEIKKELPKKKVIQEAIGIDVGLDSFLTTSQGEKIDNPRYLTKSEEKLAKIQRWHSRKKLKSSNRKKSRLKVARLYEKITDQRLDFLHKLSSGLAKSFQLIAFEKLNIKGMVRNKYLAKSISDASWNRFLQQLRYKAAEAGIWAVEINAKNTSQICSGCGSNVPKTLAVKKHKCPQCGLIIDRDINAAKNILQLALNTVGTTGINACGVGRILPTMKQEATYFNSW

SEQ ID NO: 3029 - protein, 411 aa, unidentified
  REGION 1..411: note = Table 20
MKRAFKYRIYPTKEQEESLKKQIEEARILYNLLLEASIKAYKEEKKSILGYDLNELALKIRKEKNLTHVSAQSAQDVAVRISKAFKQFFRKVKEGKHGKAVGYPRFKSFNRYDSITFPQYNNGFRLLDDDLLSVYDAGILKIKYLKDIAGKIKALTIKKEPTGNWYAIIIADGQFKNENHVCKSDKVVGMDVGLASFIATSYGELIENPKILKNSEKILKIRHRQLYKKKKGSKNRNKARIRLAKAYNKVKKQRETFLHGLTNKMIKNYKIIVIEKLNIKGMTKNHYLAKSILDASWNELARQLNYKAEEAGSVILQVDPRNTSKACSNCGWINNDLTLADRTFKCQECGIELNRDVNAARNILRLGLGTLGRRGTESNACGDEATTMGKPIASIVTEAGKSGSDLYFRNY

SEQ ID NO: 3030 - protein, 362 aa, unidentified
  REGION 1..362: note = Table 20
MRKTFKFRLYPSRQQVKIFNKVLNNCRCLYNAQLEYERFIYEKDRRFANRIELNNILPDLKIINPSLKQVHSQILQNVNDRVIKSFKSFFNSIQRGQNVGYPRFKSGYRYNSFVYPQIGFKISNGKLKLSKIGNVSIKLHRAIKGNIKTLTIMRNSTNKWFACFSVQQKITPQKRSLTKMIGIDLGLEHFATLSTGAVIDNPRCLKKSLELLKLRSRQLSKKKKGSANHYKTRIRLAKLHEKVFNQRLDFLHKVTPRLVTEYDGIALEDLKVSSMKNKYLQFSINDVAWNKFRQLLTYKAEEAGCKLDFRNPRYTSKRCSKCGMIQEMPLSKRIYNCSCGNSLSRDLNSAFNILNQSCFSIT

SEQ ID NO: 3031 - protein, 383 aa, unidentified
  REGION 1..383: note = Table 20
MLKTYKFRIYPNKKQEIKLLETLNLCRFTYNKQLELKINKYKENKVNLTQFDLNNNLIILKEENKELKQIHSQTLQDINKRISLAFNGFYRRLNKREQVGFPRFKSKYRYDSITYPQSGFKLENQLYISKIGQINIIKHREIEGKVKTLTIKKTSTNKWFACFSVEQESKSHSNLTNEETIGIDLGINHFYADSNGNLVDNPKYLRKSELKLKKLQRKHSKKLKGSNNRNKSRLKLANLHELISNQRNDFLHKQSRQLVNNYNTIVVERLQISNMTKNHYLAKSINDASWNKFLQLLSYKVEETGGKLVEIDPRNTSQLCICGNKVEKSLATRVHRCNNCGIEMDRDLMSALIIKEKGINDFSIITVGTTGIQACQRTSIEVQ

SEQ ID NO: 3032 - protein, 422 aa, unidentified
  REGION 1..422: note = Table 20
MRVRAYRFRAYSSKTTAGVLKTQLEAACKLYNTLLHAEQEEYEENKHTMNKTELRQLALDLRKQNQEFQVLHSQVAQQVAERFYQARERFLEGLANKPKNKKPHRYLSLVYPQSGWRLSNTRDVGQGKSKKRKARLYLSKIGFFTLILHREFPENQVSQVCVKLNPSGRIHVIFLVEESESQELSSKEPKNAVGVDLGIARLATLSDGRFLDNPKPHERSLDRIRVLQRTLSRKKFLSKNWFKAKRRLAKQHEHLKDFRRDLFFKLGALLAGEYDVLVLEDLNVQGLIQKSETKKRRRMRLYDSSFSELRAVLEWQFRKRGKLVLPVPSYNTSRECFRCGGINQSLTLEDRVFHCAHCGFTLDRDLNASLVLLKRAGWVPPAAPAVELRPIPPLPSLGLGRQGGAMRQEAPAFRRGSSLFVT

SEQ ID NO: 3033 - protein, 518 aa, unidentified
  REGION 1..518: note = Table 20
MVINLFGYKFALYPNKTQEELLNKHLGECGWLYNKAIEQNEYYKADSNIEEAQKKFELLPDKNSDEAKVLRGNISKDNYVYRTLVKKKKSEINVQIRKAVVLRPAETIRNLAKVKKKGLSVGRLKFIPIREWDVLPFKQSDQIRLEENYLILEPYGRLKFKMHRPLLGKPKTFCIKRTATDRWTISFSTEYDDSNMRKNDGGQVGIDVGLKTHLRLSNENPDEDPRYPNPKIWKRYDRRLTILQRRISKSKKLGKNRTRLRLRLSRLWEKIRNSRADLIQNETYEILSENKLIAIEDLNVKGMQEKKDKKGRKGRTRAQEKGLHRSISDAAFSEFRRVLEYKAKRFGSEVKPVSAIDSSKECHNCGNKKGMPLESRIYECPKCGLKIDRDLNSAKVILARATGVRPGSNARADTKISATAGASVQTEGTVSEDFRQQMETSDQKPMQGEGSKEPPMNPEHKSSGRGSKHVNIGCKNKVGLYNEDENSRSTEKQIMDENRSTTEDMVEIGALHSPVLTT

SEQ ID NO: 3034 - protein, 503 aa, unidentified
  REGION 1..503: note = Table 20
MPYIAAVLPTKPTAEQRAEIKDLQEKGLVQEFTFKVRIKATKKFEAYCAQAMGNARFMYNHLVAVAQDKYKENPEYRFNAFAEQKLFLANEKKNYPWLNKVACDCYATVFRDVEKSFKKFIKDKFDKSKAKSKKAGFPKFHRKKAFEGSFRINGINTAIAMGVHGVHSSNKLHYLRIPNGDKWFTDKDSWVKLCRPIPLNPLQVVNVTIKRDGAGYYACICMLALKEDVRRIHSENKQNRAVCGLDWGLTSKATISTETDCIHVANFKPSDRQEKHVKTLQKKLSRKQHPKTKEDALKGVKASKRYRKAQLQLRGATSKIANQRIDYERKLVSDITRTCCAIGIEDTNNKGMVKNHHLAKAVSNASPGRFLRTLQEVASRRDVLVAVADRFYPSTQKCSKCGAVRTKKDKIGLKERTYVCPVCGFREDRDRNAALNLRALAQAEVDSFKPETKELCGTRNPLGAASSDVMRADLSQMLELLKRDVIVATETCEKRELPIAKAS

SEQ ID NO: 3035 - protein, 430 aa, unidentified
  REGION 1..430: note = Table 20
MWCDIMFSMKVRYKYRLRPGKQAERYLLAEWDACRYVWNRMVDESQARYERGETFGAAQAQKYLTFLRASKTDKDGGKWLAAHSCVPQQQIVRDYSQSRGKAVSDRKTSSRKRKAGMPRHKSRKTTLPSLNYRIGGFTLVEQDGKTRLKLPKGMIIPVVWSRELPSRPKSVRVYRSPDGHWYASFVVEVESKPLPETGHAVGMDWGVKTTASTVGLNLSTGEVSEDSPDDFPHMGFERARHRQVVRLQRRMARRHKKGVKYPNQSKGYKKARKQYRELCQRIAGQRLTVAHTWAKHVCERNDIIASENFKPKFLSKTNMARNAQDAAIATNIQILQWQAVKNGRKLIPVSPAYTTQTCSECGEIANPPIGLKVRTYRCQHCGMVKDRDKNAALNMLIRAGLVPEAHGTVRRHPGATPETHVPSKLRIPRL

SEQ ID NO: 3036 - protein, 386 aa, unidentified
  REGION 1..386: note = Table 20
MKVRYTYRLRPGARAVDRLVMDAGLARWVWNQAVAAAKAKQPWWTDKTLTAARKEHDWLAAGSVVVQQQVLRDFRASKHRKRFKSVRRTQPSLNYTLRGFSLRAHDTGRVRLILAGRVSVPVVWSRPLPSVPSSVRVYRDALGHWWASFVVDIDDDSNHHPETGKSVGIDWGVARPATATDRTFDLEHPNLGRKAAVKLAAAQRRMARRKPKPGVRASRGYQAAKRQAAKIHERLRNQRREISRAWAAKVVASHDVIAVEDFRPRFLASTTMARKAADGGLGILKRALIEQGQRAGRQVVLVPPAYTTMNCANCGTRAKTRLALSTRTYTCATCGNIDDRDHNAAVNVLLRAQTTLGAGLDPADVEAVRHEHPRVLAHAESGIPRL

SEQ ID NO: 3037 - protein, 375 aa, unidentified
  REGION 1..375: note = Table 20
MICMKLRYQYKLRPGRQALALLTAQYDATRWVWNQCVERFTKHQDTSQTVLHRLLTKWRSENSWLTAQPVVPQQQIIRDFVAAKNAFFKGQRKPPRFKAAKRSLPSLNYTLRGFSLPDGRLRLAGGVIIPVVWSRDLPSEPSSVRVYQDAAGWWWASFVVERQHQVKSRQRDGAIGIDWGVKTPAKTTDGQFDLHYSQRARRSAAALKREQRKMARHRAKRDWQPYRKAKAKAATIQRTVRWQRKEQARSWAQHVAANHLHIACEDFKPAFLATTRMARKAAENAIGLVKTELAQAAQDYGATLHLIDPKYTTMDCSTCGTRAKRRIELSQRTYACNHCGTSIDRDLNAARNMIIRAGFNPADHDGLRPQLAEAA

SEQ ID NO: 3038 - protein, 385 aa, unidentified
  REGION 1..385: note = Table 20
MKVRYTYRVRVSRASVRLLEAEWDACRWVWNQCVELDSKSRRASVARPQNGDLDRLLTAWRAEHEWLRACSQNAQQQTIRDFCQARADARAIRKRGGRRGDRRFRSRRRALPTLNFTRSGPFRLRDGRLLLPHGIVLRPVWSRELPSDPSSVRIFRDALGRWHASFVVEREADPLPATGRAVGVDWGVKAVAATTDQQFDLPHTPHRDRAQRALARRQRQMARRRPAPGRAASKGYKAAKRRAAREHAQLKARRQDEARKWAVRLVREFDQIAVEDFKPLFMFGGTLAARAASARTAAARRALEDAAAKHGRELMVVPAAGTTQTCSSCGARAKHHLTLSDRTFECDSCGFVADRDMNAARNVAARAGFDPAGADRVRQGVSLAA

SEQ ID NO: 3039 - protein, 422 aa, unidentified
  REGION 1..422: note = Table 20
MVLVFGMGSTPPWAKLSDAAGMLLGVGETVRYTFRLRPGATAEAALLAEWGRCRWLWNEAVHQQRSGRGPTFCRLSKLLTEARARSSWLREGSQVAQQQMLRTYALALQHSFKVKGRGRPRPKRRKDTLASLEYTTRGFSIRSQRLRLPGGISIPVVWSRELPSDPTSVRIYQDCLGYWYASFVVRRETTPAPDVEGAIGIDWGVTTTATTTDAAYDLPYLGHRKRCAAELAKMQRRMARRRRVKGAPPSNGYLRAKRRAAKRAKRAARQNIHDARVWANKVVDNHATIAVEDFKPRFLARSRMARKAADAAIGAAKRELVDRGLRAGRRVVLVPPAFTTMTCSRCGTRAKHRLGLGVRVFRCDDCGYTACRNRNAAGTILATAERGRAGADDVRHAITSFRDGALVRSEPEIPRLPAMGKR

SEQ ID NO: 3040 - protein, 455 aa, unidentified
  REGION 1..455: note = Table 20
MKVRYTYRLRPGAQARAYLGREWDACRFVWNQLVEASQTRFRQARATGDLAATFGYKDQAALVTQLRHNVSGPGVDAEGANWLALSAQDPQQQTCRAFAKSRTKALLDRKNKVRVTRRAGLPRFKSRHHSLATLSYAGHNFGLTTHPATGRDALRLPGGVLIPVVWLRPLPGKPSSVTVFQDAVGHWYASFVVQAPDETLPAVGDGRVVGIDWGIKQLATTVTAHVDDAGVVTQVDESGTFDLLYPGHGKTAAQKLARYQRMMARRSYQAHGNPRGTPPTKGYRRAKKLTAKAHQKIANQRSDTAHKWAKALVAQHDRVAVEDFRPKFMSKNRSLARKAADAACGATKAAMVWQAAKAGRDLKLVNPAFTTMDCFHCGARAKHRIPLDQRTYTCTSCGVASDRDKNAAAVVVARAFGRGSTTHGSPVDKAAGAGQRPAGIEGVRPEPAAARAPAA

SEQ ID NO: 3041 - protein, 443 aa, unidentified
  REGION 1..443: note = Table 20
MATKTVRYTFRLRASARAEAALMREYSLCRAVWNHMVAESRNRHQHRRAFKQSGLSTRYVDQRGMLRDCFEFGYNEASRWLTMLRHALVDEAGRQWLAEGSAVAQQQMVRAFASARRKALMDIKKRVPVSRRRGLPRFKSRRTSFPSLNYSKDGFRLAESDGRTRLRLAGGIVLSVVWSRQLPSLPRSVRVYQDSLGHWYACFVVLLELDAEPGPPSAALGIDWGVATTATTVHVDTSTGQKDFSDSYDLAHPQFGKAAAAELARAQKRMARRRGSKGQPKSKGYVRARREAARVYKRVANRRRDTGHKWARRVVAAHSKIAVEDFRPRFLAKTSMARKSSDAGIALLKGILIWHASVAGVDLQLVDPRYTTTDCANCDARTKHHLPLGQRTYTCESCGVSRPRDKNSAAVMVVRAGFIPGGAEDVRPGVAAVPTRQSEPEIS

SEQ ID NO: 3042 - protein, 524 aa, unidentified
  REGION 1..524: note = Table 20
MPNHLNYKYAIFPTTPQRRHLGRQMRECRVQWNRAVATRKRVKASLQCFKAEPVLREVLSIQKDNSQGLRSKAINRLREAFPNCDPKDLPMLYDLRKIFGNAFAITAEHLDLGQLATEIQPMLREELTANRAYWRLPEKDRAKLPPKRPIYYKLLSAASNFAGLEAQRYMNKAFVSQRTIARSAVRFTVSGSEGKSRFEDACSPSPEQRKIGHPGEPRRKRRVESFGYQETGEVLDGDQLTVKGLPGGMDRVRVLLHRPIPEASKLKRMTLMQEGRQWYAVLTLEVPDEVYRLEPKNPDLSIGLDPGAISALTAAIVNEKQDVVTYEKFDWRPLEENLEKLVLISEQLSRMQGPDRRKQQRASNRWLKLNARRRRLHGRIRNQRRDVLHTLSRHLADHGFIAIGHWEPLRKVTGRADFKEGKTETVEAGPKGVVTIRREGRDRSVATLRTLTAEKADRSGVQVITHAEEYNTTRRCSACGELTGPKGDPSIREWTCSHCGAEHDRDQNAALNILMLALEGQVQP

SEQ ID NO: 3043 - protein, 655 aa, unidentified
  REGION 1..655: note = Table 20
MKQQFLNFKYEIFPTDPQRKKINNLLFQSSIQWNRSVSTFLKLQKAINLGQYEYVVSKIIDRKKGKNNNHGKRKGHIEKLQEQFPDTSVEQAGILYDVGRMFGLFIEELTPEFSNPVFLAAHLKNFHIEGNEKVKWKLSDCCKEISGEIGNRYIAFPSNKKKVSLSEMRNNVTGSKDSKRWKTATKPTREQRTYGAKGFPNFKSARKWNSIDYPPKKKLSELVRKRKKGKEYLANIRVLPEGMREVKMAYHRPMSDGKIKNINVQRDGKHYFCTFCVAVNEKDWQLPLKKGLIAGIDPGADTPVTVGQLDINKKMKSNFSLNYEFFEKNRLRLEKLQQALSGKQGLYRNKIELKKAIKEFEFFLGDIESEDKKKKVQKRLNYLQKQKIRTKPSKAWLKLNYEIKELHYRIKCQRKDILEKISHYLATNCELISFGHWEPPREISYRKKLKELQKNLRMGEPGAKKALEEHEKMKSKNANKGIKKVRRGGRDRSIATMRAKIESKCERSGSLFIRQNEAYSTVTCHVCRKKTGPKQDLSVRKWICENCKTEHNRDENSSYEILNKSLDNILAVQAMSSAVSANSKSKIRKQELEVTSQGLISFLGSVPTTAPAGEVFPYYNGTGVKLLSKKEGSLKSLDSMSFISTLEVGECTEFG

SEQ ID NO: 3044 - protein, 686 aa, unidentified
  REGION 1..686: note = Table 20
MAILNYKYEIFPTQPQRAQLNKILRGTRIQWNKAVTIRRKLKTALNSGQLEHVIKTCLSLEKSNTQGKRSAAIKKKYPDLDFDLAAKLYDISNLVGKVLEPDQKYLDINLLADELKAKHEAELAKRKEAKKAGVDKKKLPKLTVYWQMMRTINRYAGFAAKTYMDNSFESPKGMAISTIRFNVSGSGESEVRWNRAVNPTPEQRAYGATGEPQYKRRCEGFTYQNTAKDNLICEKRRSEFSIFINALPDGMRWLDMAYHRPIPEDSKIKQLTIKERARRYFVVLSTEVPDSAWQIIPMQAGWHAGIDPGAQTALTVALKNSNSNELRHLAIHYEFLEESLSKLEKLQQALSLKQGPRRKRTEEEIKEALEKFESKSSVKKLPETERKKEIEKKRKRLEKTMVFTENGPSKRWRRWSQRVSALQFKIANRRADVLHKISRALAEGCDVVGIGHWEPVREVSYRKKLKMLKKQVGQGIEGAAEALKAHMEEKSKQGPKGAKKRRRGGRDRSIASLRSLIEEKAKRASIYALPNVNEAYSTQICSFCKELTVPKKDLSVRVWKCEKCGTVHHRDLNSAFNILEKAEQEIASAQEAARETRPTVTRAMIQGATGQAGRKPSLRATGSLTEGKGKPSPKKGNTFFNEHADIALPNLWNEEVPKALKSLIHMGIVRPLTMQMGDETGSENPP

SEQ ID NO: 3045 - protein, 395 aa, unidentified
  REGION 1..395: note = Table 20
MFATYEYRIYPTKEQLSVFNKTLGLCRLYYNLVVEHKNKDYRMPIEGYKPTFTKFKPEALGWLNDVDSMPLGQVWSDVRGAYTNFFSSIQGSRKGKVCNRPTFKCKKICKASFRYPVQKMCVGLYSKGLYVSSRLGYIKIAAQSQFCEGKWKNITFKRSASGKWYVKICVELKEEQTKIQNGKAVGIDWNCSDDSFLTMSDGTKVKCPRFLKRKEKQLEKYQQVQSRRFVKGKDVQSKRYYRAKSKVARLHEKVANQRRDWLHKVSRELANKYEYVFVEDINMQKMSAEKEHGRTVGDQGFGLLRQYLSYKTNLVKVPAQYTSKTCNVCGIVNKDVVLGVKQWVCPVCSTQHDRDINAARNILYLGVKKTLGGGPAEVLNNARLQNRECPKPSVV

SEQ ID NO: 3046 - protein, 408 aa, unidentified
  REGION 1..408: note = Table 20
MKDKGVVLRCRKVRILPSEEQREILKSCFGIHRHIYNECVKAEKDGDIDGAGVRECYKWRKAFTTREDYYGQGKNWKDDCPSHTKQQAVEEFFKNKKTGLKLVSEGKIRRFDIGFKSRFKCRQETIPFEKFLIKKKDSTNPLSKSLVSTTYKGKSMDLRIMGKVPKVFKDRDDQGFTRTEMKITRTKTGKYYAIVSFEVPQTSRFPEIHGDMISFDPGCKTFQTYHSPDGTWGEIGTFEKQELLLRKADRLKSRLELEGKDKDSRWRRRTRRRMLNLFEKVRNRTADLHNKVCSWVVNTYRLVLVPEFKTSQMVSSKKLYSKTCRKMMTWSHYRFRSKLIAMAQKFTDVKVRLCNEAYTTKQCGSCGVINRSMTLNDRSFNCVSCGLSSSRDGHAARNVGLRSLRFLV

SEQ ID NO: 3047 - protein, 394 aa, unidentified
  REGION 1..394: note = Table 20
MKKLLTTKNFRLYPTKEQKRLLDRELNFYRHYFNSLKAAITRRREESLIPLVEQDIVEICKATKEKILKLDFDFNKYYYRSHIKFATDNMMLAFKYPRKKGLKKYHLEKTTIKIDDPSCYVMLNHLYFKNNIKIKLRPKVETLNGVSFYTITKNRNKYYLTAVIFIDAIRVKKTGKGCGIDVGFRNGLVLYNTDGEVSEYKFQNAKVDRLFKQAEFYKKTIENIEAKNKDYIVSKNYQKVTNKLARTYERITNIRNHEFNLVSENLALKYDLIVVEDLEIEDIYKGNVKRYEISKASYGRFFDYLKNKCQKYNKYFIKVPRFYPSSQICSECGVIHKEMKDYRDAKMMICECGYKEDRDINAAKNILRYGLGELRRRNQNNKDKYKKGKNVEAK

SEQ ID NO: 3048 - protein, 365 aa, unidentified
  REGION 1..365: note = Table 20
MKKGFRIRIYPTEEQEELLSFYCKTTHNMWNFLVAKYKDKLPVCNCYGIKDYTPRDLINEFGVEIPQRIAFGVMKTYCDAVKRRFDKIGNAPKFHKYDPHKQSFYVTSTTVKVKNDTVQMTLVAGKKVTSKNILLDPQQIEKFDITEIIEPRYTCLKGKWYISGCCNVADVEDSGIEEWIGLDWGIKNFMTTSNGEFLNYPKTVLREYQRIKRLQSIMDKKKRGSKNRDKMKKKLSSAYERLENLKRDFIEKSTTEICKKSNVSVENLKGIEKRPQKFIRRQMMIAPRDRFVEKLEWKCKRFGTRFVKVSPAYTSQTCSVCGEVHNLKLKDREMICECGNHMDRDVNAAINIRNAAQAASVFVAP

SEQ ID NO: 3049 - protein, 233 aa, unidentified
  REGION 1..233: note = Table 20
MYDKEKEEKEKNGRVVGIDVGIKSTIMMSDGEVLSLDKDRIMKLVRKIERLQSIIDTKREINRKRGIKYSKRVEELERKRDRLFKKIENIKQDFYYKAVNHILNSHEYVAVEDLDLDKLRQVKHNNRKAEKNIHKYLMYTSLGKFFNILEYKAQLYGREVIKVDAKDTSKTCSNCGYVFHRLKLSDRTFRCPQCNFKIDRDLNASINILKRGLEHLAPSAGQVEYMPEMVIAR

SEQ ID NO: 3050 - protein, 448 aa, unidentified
  REGION 1..448: note = Table 20
MSEKVLVEHKRVFKFRIYPTKEQESFLTQNCDASTIAYNSALGYLKDYHEPLTKQWKEHCEKEGVEMKYHEYLKMVDKPKLTAYDAKKWFNNDFKKKEGNEWFNEIITAGTANSILDLDKAFKNFFRGAGYPKFKQVRRFPKAFRVERNIKTDTGAKLHIKDRRLELPKFKKIFKNYLIKTKVSKLDTRVGDKYYSLEDGVTKSFTVSATSTGKWFVAINVTYLLPEVKPKSFNKDNSIGIDAGLEDLLVLDDGTKIKNAKHLKKQEKRLRINSKRLSRKKLGSKNWKKQVKINARIHEKIANRRSDFAHKATHELAYNDSYNAFMMEDLDLKEMGAKKGYRGKSVADAGLGEIRRQIEYKAGWAGKTVIKVDRYFPSSKTCNCCGYVVDKMPVKKRHWICPKCGTRLDRDINAAINVKNKGLEEAKAKAKVKAKPSSKKKRKTLKKT

SEQ ID NO: 3051 - protein, 373 aa, unidentified
  REGION 1..373: note = Table 20
MRFNRAHKIKLYPTEEQKVKLTQQAGLARFVYNWALDQNKKDYQEYKEGKRNKAPSFYDLSREFTQYKKNNAPEWLSEAIVQTSHHVIKDCSIAYKNFFNKKSKYPKYHKKGIKDSFYIHNQSAKIIDNFFKCYKIGCIKLAEKPRYTGKIMSYTVSKDKDEWYVSINYELKEDPRPVCSNPESVVGVDVGIKNNITLSTGEQYNIRDTKKLENRIKYQQRYLSRSKKDSKKHIKRLTKLHSTRSKLQNQIKDDIHKATTAICKNHGIVVIENLKVQEMVKQSKNRAMRRNLNNARMSEIHRQLQYKSQKCVKVDKFFASSQICSNCGSKHKMPLKERTYVCPECGLILDRDINASKNIRNQYLSGQGMSIVC

SEQ ID NO: 3052 - protein, 423 aa, unidentified
  REGION 1..423: note = Table 20
MYRSRKVKLYLTKEQDKLLLHQLGIARWTYNHFLALRIRYYKIYGKHEGFKAPSAYTLSRHLTKIKQTTKFSWLGDGFAHGMQVKLQDLDTAFKRFWNGQGRFPKFKRKFFNDTMQYNVAVGINIKKDDNKKNVITLTKLGKVKYAGNLLNGKVKYATIKRHIFGRVDLTVLYELPQEEIIPNGVVALDANCHNFTDNYGTKYTLPAYCFSKKIKYWQKAIARSVKGSKNRFKKRQNLSKWCNKGAMARNDRAHKISNKISHRIIRQGKIHASLIILEDLILSNLIRKGKNKRGLNRSLQDSALDRVRRQLKYKSAGVHKIDKWFPSSKLCSCCGVKNTALSLSDRFWECNHCHTKHDRDINAAVNLYNKWTGNIPFIVASGGNTRPSEVSLLANSNSLMGWGSPSWRECKTECGYAASGNSL

SEQ ID NO: 3053 - protein, 397 aa, unidentified
  REGION 1..397: note = Table 20
MKKGIVKSFKTRIYPNQDQKNYFNKCFGVRRKVWNMALEDYQNIDDDKKFSGFDFQKKLNNEIQNSGNYPYLYEVNSMVRQEALKDLNQTFSKYYEMQSKARKSKNYIDSDKFKPKFKKKKYSNDSFRFIVKDKLSLPVKFLSKKWIRVSAMKGIKPFVIKTKESLKFINSNDINFKYYTISRKNEKFYISITYEIINYKKQRENNYSIGIDMGIKTPLAAVDSNGQVFEFKIPNILWKQERKTEKIKSKLDRKKYYSKSYYKLLKQLRKSYNREYDMLEDHRDKITNWLVKNYKVINIEPYPHKISDRFRNLRRSNRRFGKYDFLEKLKFKSNFYDNELNIITKKKTTQTCSSCGYVRTNKEKLVLGDDTHDCPNCDVVLDRDLNAAKNILDLKYV

SEQ ID NO: 3054 - protein, 390 aa, unidentified
  REGION 1..390: note = Table 20
MIKTHKTEIFPNNLQREFLERNFGVRRFIFNKTIMYLKHKYGDLKTNKSLITKKEVTSLRKELFRKNYKAIISTASSHLLDTVIEDVMFALDSLWKKGKDIQLRKKKFSNTCRFHAKGSNDILVSNGVDKYVRLPSLRSQIGLMNKVKMAEPLRWKDAKILTATIKREAGRYFISLSCEIEDSVKPLNKSRHLGLDWGIKTYLTGFDGNEVYEDDFDNEILLKLDKRIAKYQRKLNRKVVNSNKFKKVTTKLQQAYLDFNNYRKDYIYKLVKDISDNFDSVSLEGLSVRFVTKNKGLAHKAKQKPFYMFKIILVNKFNQLGKKVYSLPKTFASTQICSSCGYQRTKEAGDKLTLKDREYDCPKCGSVHDRDINAATNIYNFKNLELMVLN

SEQ ID NO: 3055 - protein, 381 aa, unidentified
  REGION 1..381: note = Table 20
MLVSQRIEIFPNTEQKELLAQCFGVRRFVFNKARSLLISKYGNLKDHIKEIKKKELTDLRNQIRKDYNHFTSLVPSQIAGTAIEDLQRSLDSLWKKGKEVHFKRKKDENTCRIERKTDTTFNVSNCGKYLKVVKLGNIKLSENIRYPFNDNIKLVTIYTKANRYFLSLTMEVDRKYISTHKHTGKKIAFDWGIKTFLTGYDGEGVFEADFDRKKMDLLDKNIRAKAKSLSHRKFRSKNWFKAKTKLEQAYMNRTNYQEEFIKTLANEISQHYDEVILEDLNMSFMLKNHKIAKKTSEKMYYKFKSLCSNILSRSDKVVNLVDKSFPSTQMCSCCGYTRTGVEKLTLKDRLYKCQSCGFELDRDENAAINLFQYKGNLTQFK

SEQ ID NO: 3056 - protein, 497 aa, unidentified
  REGION 1..497: note = Table 20
MMADKQDTMKLTRLVRIYPNLLMRDFIKRNIRYSQECWNRGIKTWQHMYHEEPNHLKKIVFTPKKDKQKVKIKTKRFYQTHLVVKTTVKRNRQNKIISYKFTPVTRKYTPTGKSVRDNIIDANRTKGIKETIYPNEVFQNVLIYDLDQSYQAFFDPSRPDSKRPKIKQKISDNGSYLDTQAHIRDGKIFPTTNVKMPNRKLYTGGIRCGEDLSDLNDKNKRYRMRFIHRDHKFYVAISVERPIKSLMATGQWDGVDVNVDHFNSTNKVVWLSKQPLYDRKLGKAVYQKTRLARLYDKIAHYQRTLANKRECIIRHAKKAKQKIDKSLWQTKNYQKIQLKLRQCYLKVDHIQHDIVQKYTNYLVKYHDRIYIEDLDVKHMKMGVASKGLHRSLFGYFRQTLTYKCQLFGRELVVVHAKYPSTQVCPNCGFAKAGDNKITLKGNQKHHTKHNEFKCYHCGYTADRDAKVPVSLMRYNADSMAEIMKRQKLGQDYQVLGI

SEQ ID NO: 3057 - protein, 405 aa, unidentified
  REGION 1..405: note = Table 20
MRDIVWNKGISYWEMKYQAHSLLDKILYTEFIPKKDKHGKIKVKQIDHHLNPSPNWRSIRNEIVAEKNNSDYLFPAHLIGLTMQDLGQSYKAFFDKKRPEAKKPKYKNLTSLTGSYKDDQASIKQGKLHLTSGANEKEAYGDIRMAEKLPDQKLKTITVIKKDDNYYVAIAQEKTLLHLMKTGQNDAVDVNTREYVSTGYRLTVLPKRLEFLYKRIKHYQRMLAKKRIVNGTKKARQSKNYQIIQEHLRRDHRKVTNIQHDLMQKYTTYLVKYHDAITIEDLNVKKMLMSHVASKGMHRAMAGYFRRTLEYKCQEYGRRLIIADKLFPSTQMCPKCGLIKTGDEKISLSGNKKHKTAHNEFICYGCGYKADRDEKVAPVLMRYSKSMMKSILKQKKTNDRVYAFA

SEQ ID NO: 3058 - protein, 432 aa, unidentified
  REGION 1..432: note = Table 20
MKRQSDEKTENAFTRTLVYRLYPSKADQVRFQRYCDYRRYVWNEYKDENDHAYQRYRYERTYYAKVGIKVKAKEFCSKYPTFARTKKQVNHDKKAWEYKYPSKIALMAMTDYDNAMSNFINKTMPDWGKPKFRSKRSPRQGFKLPAESLKLNGRTITVAKGRKDKKHGNLVLKSRQSFLDYPIGTASFYTEKGRYYVAVPYLIPKEELKSDDKLKGKAGIDLNVDHYNIYDGKHKLIDLNMRQLKFYYDRIKHYQRLLARKREFDKKNTGSRNYMETRAKLQRDYKRVADIQNDFLQKLVLGLCQKYGQIVIEDLDVKHMKMGVASKGLHRSMFGTFRSILTYKSEQYGNDLVVADRLYPSTQICSKCQYRKTGDEKITLWGNKKHHTKHNEYVCYNCGNNIDRDENASINLYQYLDSKWYKEKSRAEKHMA

SEQ ID NO: 3059 - protein, 465 aa, unidentified
  REGION 1..465: note = Table 20
MAIKRTHVYRLYPDATMAHVLDQWCDYRRYCYNKSLELWNTTYSEYRMLVSPEILAEFKKPKEEQQFTEEQKLFISRYYPTAALIQKKLTASKQSWERQISSRILQQACADLGKSFKKFAKDKALKVKRGAGRPDFQSKKAKRQGFKLNQGVVLAREGNHGKLTLPVPAPYKGEWHSIRFSEIPKNAEFGTISFYREHGHYYMAVPYKYETPPYIHKHTGKKTGIDVNVSHFNDAEGEHYFLHKGNNGAVNLGRVYENIKHQQQILARKLEENGQIAGKRSKSYQKARIKLQKLYERAHRMQDDAMHRYTTHLVREYDAICIEDLDVKGMLMSHVASKGVHRALFGRFRSYLEYKCKSAGVKLVIANRFYPSTQRCAACGNVKKDDEKITLSGNKKHGTKHNEYVCYNKKCPNYNKVVDRDMNDMTPEIRTLISGVIFMTKYTKEIKLAIYHEWVDDHRRGTYLS

SEQ ID NO: 3060 - protein, 234 aa, unidentified
  REGION 1..234: note = Table 20
YVAIPYKIKAEDVKLPDKTGKATAVDVNVGHFDYTGGRVNVLPKKLDRIYKKIKHYQRQLAKKRVKNGEAACESINYLKTKAKLQACYRKAGNIQNDLMHKFTTELINDYDKIVIENLSVKGMLMSYIASKGVHRSMFGKFRQILTYKCDWYGKELILANKLYPSTQRCAACGNVKKGDDKITLYGNKKHGTKHNEYVCYNEKCPNYNKVVDRDKNAMLSLLALTEHPELNHAL

SEQ ID NO: 3061 - protein, 419 aa, unidentified
  REGION 1..419: note = Table 20
MRRKKKETENPIPTITRAHKIRIYPNKHNQEVFQKYYDYQRSIWNRAIDERNAQYKIYKEMKATGLYTQKELNKNYFPHTNNLRKMEKFDWENNFHCRVREIQFDNLCQAWDNFFNPNMPNHKKPKYKKKKDVETHKKLALRRVRTKGKWLFLPKSLKSKPEYRFTRIKMAQELRFDGRVVDDFSVSVENNKWYVTITVETQLEEKIAISNHSTGIDVNVGSIDYLKKDGTNKEYDKFYLLPKSLLRQYDKIKFYSRVISKKRNKNPYYKYSKSYKETITKLNNAYTKAYNIQEANLNNMVKYFFDNYNRIVIEDLDVNSMKMNKRLCKSLHRNAFGRFKRKMVNKAEEYNVEFILADRYFPSTQTCSECGHIKTGDEKLFLWGDKYGNDHNTYVCYNCGTIQDRTENAILNLVNYGKR

SEQ ID NO: 3062 - protein, 394 aa, unidentified
  REGION 1..394: note = Table 20
MTYVSHKTRIYPNKTTIKLLDSYFNYRRAIWNRALTVWNDAYDEHLINANQSPTWQSVRNELVSNKTDYDVMFPSTILKSTCNQLGKAWKMYFDKTLTKFNRPVFKSKKNTKQSFTVENETSRVMIKNNKLVLPISRDLKHKSYGIRLAEQPRFKGIVKVLTISKDVTGYYVSFIIKLDEPIPTIKTGLSVGVDANIKHFDSKDGSVNILPDRLLSLYEDVTYYQRALAKKRSANHQFKSNNYRKVITKLQRAYLDINRIQLDILHKYTKQLVKKFDYIAIENLDVTQMKMNKRLAKNLHRSLFGKFKEMIVQKATMYDKTVYKVDRFYPSTQTCSGCGNIKTNDSYGGKHSLSGDSIYHQHQTYRCYECGLVIDRDINAYTNIEHKMLQELQI

SEQ ID NO: 3063 - protein, 442 aa, unidentified
  REGION 1..442: note = Table 20
MGVFYHVIQLLWMNLDSKQLSTEGDKHTFDSVSLKYKEVNRMPIKTHKIRIYPNAEMATVIIELMDYNRFCWNKGLAAWNDMYDASLTMANKKLRPSEYKVRDELVKNKTDWQHQFSARVLQTAVHRLHQAWQNFFNPAMPDAHKPKFHHKRDPKQSFTTDRAVITGKYLTLDRPHAASHRFSAIKMAETLRFTGEIKTVTITKRGKKFYASVNVLIEDTPRPAFYDCWDIVGIDVNVGHIRWNGGDVNTFTPRMAALHQRIKYYQKCLNRKRRRNPGDYRSKTYQRIKAKMNRAYEQVHALQDDLIHKFSHKIINNYPVPCLEDLDVHGMMMDDKKVKGLQRGLFRRLRTAIEYKAAWHHRHLVIANRFFPSTQRCSNCGYIKKEESYGGKMTLQGDSIYHQHDVYRCYECGLIIDRDDNAVQNLIQYAAGLTPEWETVQR

SEQ ID NO: 3064 - protein, 394 aa, unidentified
  REGION 1..394: note = Table 20
MIKTHKIKLYPNATMKRHIDHLFNYRRYCWNLALETWNTLYELHLIDKENNKKPNEYAVRNELVAHKEDWQFGLSARVLQQSVASLSKAWKNFFNPQMPHHDRPKFKSKKLSKKSFTTDRAKINNGKLILDKPRDRNVTWYGIKMAESPRFEGQIKMATVVEEADGLYACLSIDTNDNELSEGKDVAGVDVNIGHFNYNDGKTIDTLPNRLIKLYERITHYQRLLARKRVSNPNQFRSNNYRKVRTKLKRSYQRIARIQEDLLKKFVSQLSTDYHTICIEDLDVNRMKMNKRLAKNIHRSMFRKFRDMIQYKSEWMGNRFVVADRYYPSTQRCSHCSHVKTGADKMTLQGDTIYHEHHTYRCYECGTVMNRDENAVTNLIHYAVGLTTEGAQST

SEQ ID NO: 3065 - protein, 404 aa, unidentified
  REGION 1..404: note = Table 20
MYLTQKIRIKPDDELEKFFYNCIDGQRFFYNQMLQVWNTLYEKGENPSHMSVIKEVRHLLKENNLVDKDGNKYDDLTWLKILPMNLLESAKEHIKVAFNNFFRKLKESKDPTKNRPKYKCKRTSKKSFSIYLKNSTTFKYNSQTGDFKFTKSPTFYIKEKLRYYTKDSEIKLITITKEPYGWYIAITYSVDDYSLYRERNGDKVGIDLGVKDFAILSELDDNGKPLKINFDDVINQKRFLNLNSKLKRMQRALSKKRLKNSNWKESKRYELLKTKIALTYARISNMKKDFLHKLTTAIIKDFDSIAIETLKVSNLLKNKKLSRSIHESCFYMFKTILKAKASMYGNLIVEADSFFPSTQKCSCCGYVKTKTEKLTLKDRIYSCNNCGSKLDRDYNTALNLRNLI

SEQ ID NO: 3066 - protein, 401 aa, unidentified
  REGION 1..401: note = Table 20
MYISQKVQIRLSNSSKKEFEKNFGYRRWIYNKGLEKWNKRHDYCKMHNYFEKIRDDSLDKDSKKFIRKLLPNERNIREIIRPYTKTSWRKSRPSMIFETAIADLGKAFDNFRIHKISKYPKFKSKKDLVQSCRYYKKTESAIKLNGRKLKLQKSPEVTLLEDIKFDGVIKEVTISKEIDKWYASFCIDMGDKRPKKVPHKSIDICGVDLGVRTFATIFDSNGEIFEVSSQIDDLEKLYNRTKVYNQIMKRKKINSRNYNDTRTKYQRTWKRIKNIRSNMVHELTAFLVKNYKCITLEDLNVREMISNKNNLTKGIRKSIAESCFYEVKRQLEYKQHIFNSELVQVSRWFPSTQLCSNCGRKNKIGSRKQYSCSCGHKIDRDINAAINLMNEGKYISGLVNP

SEQ ID NO: 3067 - protein, 231 aa, unidentified
  REGION 1..231: note = Table 20
MPVHPLLDERQDETFGIDVGVKQFASIANQKKGGNEIVSLPDSIKLEQLKIAKFQWRNRNKQLGSKSKPPSKNAIKYYKKLANYHTHIANVRRDFIEKTTTKLVSKIKHICLESLNVKGMMQNGKLAASIARIGFYQFRQRLTTKIVSSGGTVVLADQWFPSSKTCHNCGYIHQELKLKDRTFNCPHCGMRIDRDLNAAMVLSQYGEINQENREGCARIYACELEEGGLPG

SEQ ID NO: 3068 - protein, 388 aa, unidentified
  REGION 1..388: note = Table 20
MLEQGIHLISTDEMTGIQALERLFPNKRIKPKQVEKIEFEYERHGTLSLIANWDVARGKVVSPSIGPTRTEQDFSEHIQRTIKIDEKAEWIFIVDQLNTHKSESLVKLVAESCGITIDLGRKRKEEILQSMDSRADFLSDESHRISFVYIPKHTSWLNQIKCWFSILVRRLLKRITVRSTEELSQKILNFIDYFNQHFAKPFVWKFKGFKDHKRLVDYFCQAALGNRRAGIEPSKNAVKYYQKLRKKHKRITNIREDFLQKITTLLAKTYQHILVEDLNIKGMMANHKLSDALSNLGLYRFRELLSYKQECFGFLFTIVDRWFPSSKTCSVCGNIQDMPLSERVYHCQNCGQVMDRDVNASINLESWTNNADGLSVNACGQEGAVSLG

SEQ ID NO: 3069 - protein, 270 aa, unidentified
  REGION 1..270: note = Table 20
VELPKLTERIELCEDLSKLFDYKNTKLLSITVSKQHNDYYVSVNFCFDARYTVKNKQLQLKKQHQKIKSVGIDLGITDFATVVDSNGFKEKYFSLKTQKDLLQKMKYYQSKFSKAKKTLTVLQNGSKISVWSKNKTKWHGKLRKLQIRIKNIKQDYLHKLSTELCLKYAEIKLEDLNVKGMLKNHNLARVIQESCFNQFKSMLTYKAIKFDTKLVLVDRFFPSSKICFNCKTKNQSLKLKHRTWICAGCQTTHDRDYNAARNILHYNSVV

SEQ ID NO: 3070 - protein, 860 aa, unidentified
  REGION 1..860: note = Table 20
INQFVEIDLHEFTSVKEWKSFIREKYVNYNFLSNQSDKFRFDKFLELEESQSTESPKQYFFEYIRRNPNLNYINNLHFTLGKIYEDFLFKSSKNLQNNEITETLRVLTKIFYRIKNCDTLEGFCNYFKTFKNQGIIHTNLSLRGFSKNLRWINKYSYITPTYYFDWKALNIAYLACYLKFNPLLEKAQIDKIINQMPFLIMPNLSITNFTVELSAYFVIPEIYIEDLKYMLEKMERNGYVTKKICSLAKKYVFSLNLNYFRDFHKNGQIINYNNKNHSNDYELEFIQNYSKKFSKANLTLLDFLILDRIRFFSYVGINFSRRREISNIIKSDYNNFFSGENGLTKELENCLEVLINSPKLREDFLNFLGRNQNFGFFYIKDELEKWVNYSQIIERESKHTINDFIHFKEFYEKEHTLQLIEEDGVFDIIDSNSYSFKNLFLNYLNSREKYTREVENFRFFFQFLKLCSNLKIFNIKSIKRIISNLELLKEITQIKKARLRDLKKNNKIYEISNKTINLRINELINNNPKIIKPYLIDSIWTNSISSYFPQLILKNSPEVKAIIDKIKKWFPKIYFYETTDLFNEQEYIFLHLFIPYLKNNEKIMFISILSNIFKKDIISFNRYSWNGLLQTFSRKNFYDFNKRAFFYTKDLFKQYFLYIKGILGEELKPFKEKTVSSVRFWSKKEYMKNLINKINNRKKDWIHKITHLLSEHFDCIILEDLNIKGMQQFNSGLSKSVTLDFSWNQFNNILRYKMEQKGKYLILIDRFFPSSKMCSVCGYINNQLKLKDRKWSCPACSTEHDRDINASINIRNKGLENLKENQIKIINNNDTTVGTTGFAFGENVRLINQQFSRKKEATCL

SEQ ID NO: 3071 - protein, 411 aa, unidentified
  REGION 1..411: note = Table 20
MVHLKAMEKGKLTDPNPGGDTTDEGGSMTMLATLTPAPVAAAPGIGRNPHKLEKEEIEKEFWQVWCEHRDRLYRCCLRLMNSNQTDAEDALSEAMLKALKMVRKFAGKIANLPAWLMTLTRNLCLDIIRKRSRGAVGVDDIEWVGDRGEMGVASAVELQEQVLEKDERSVVIRRAIASLPERMRETFILHFYQELSNQEIVERQGISIDCVYKRISQARKKLKEMLSRYFIDFDGSVLGTERELGDANESCQKQEDLANVSVQEISATPGVSGEEQKREELEVVSADIAPENSQGLETMTVSVSEECVEVDGAEKSELVDGAGFSLGMVAVADSSLYEIRRQVEYKASWYDCKLVFADRFYPSSKTCSNCGHIQEMPLKERIFNCEACHISIDRDFNASLNLKHYAEGYSV

SEQ ID NO: 3072 - protein, 302 aa, unidentified
  REGION 1..302: note = Table 20
MAFRSFFRHNTDYPTFRSKKDNQYFIVPSGFKVKKNRLIIPKFMDGIVYRDESSIPENIKQIFVTRDVERYYASIQYETDEELTRVDAIIGIDMGIISFLTTSDGVQVEPLNALRTGEKKLRREQRRLSRKKKGSENRKKQIVKVQKIHQKIRDARTDFNHKVSTAIAKHYGTVVVEDLSIHGMQGNHHLAKSITDQAWHQFRQMLQYKMDWRNAELIEIGRYEPSSKICSKCGNIRHDLKLWNRIYHCKVCGLSMDRDLNAAINIRNMGLIKVGRGTPEFTPVESATAAELLKGGLRVATL

SEQ ID NO: 3073 - protein, 484 aa, unidentified
  REGION 1..484: note = Table 20
MMVLENACEFKEYLWSVFDEMGFYGGFEVVGNNINLNIIHKDNNDLPTKEQVLEKFQENIIKVKKQELENQINAICKEKIIKEFRSSVLGNLHAYDLTLEDQANLQENYQLGIKTNHLQLKKEFNALKKSQFNFVYEVTKYATQQPFIHLNLAFNKFFRDLKKGLVSYPKFKKKREFQGSFYIGGDQIKIIQTANTDYLKIPNLPPIKLTEKLRFQGKINNATITQKGDHFYVSISCGVDESEYKRTHKLQESHNKLGIDTGIKSFVSLSNGLNIYAPKPLDKLTRKLVRISRQLSKKIHPKTKGDKTKKSNNYLKHSKKLTHLHEKIANIRLDFLHKLTSSLIRHSNSFCLESLKVKNMFKNHRLAKSLSDVSMSVFNTLLEYKAKYSNKEILRADTYYPSSKTCSNCQKVKQDLKLKDRIYQCLECGFELDRDINAAINLLKHLVGRVTAEFTPMDLTALLNDLSNNRLVTSKVELGIQQKS

SEQ ID NO: 3074 - protein, 281 aa, unidentified
  REGION 1..281: note = Table 20
MKLTEKLRFEGHINSCVISQQGERFYASFNLEISEDEYKRTHKGNEANTEHTIVGIDVGLKAFITTDAGLFIQAPKPLKRLEQRLKRAQRVLSRRVHPKAKGDTTKCSNRYKKQRLYVSKLQRRIANIRKDYTHKVSSLLIRHYQYLSLESLRVQNMMKNHKLAKAISDVGFYTFKTQLLYKAQYNYRVVFEAETFFPSSKLCSNCGTIHKHLTLADRTYVCPSCGFTIDRDINAAINLKEKMKQTLIGGVTAEFMRVDPHRLNEDLAINQVKAMAYEARI

SEQ ID NO: 3075 - protein, 450 aa, unidentified
  REGION 1..450: note = Table 20
MLIELNTKFLIMKTRTDPKLIYIAHKIELKANNKFRTYCRKAFGVRRLSYNWGINKLKENIHNGIQGPVIALKKEFNAIKREQYPYVMEVSKYASAQAFVNLGQAVSKFSEDRGKKFVKFRFPKLKKRKKFGGSFYIGGDHVQIITGAQISKNLKNDSKKQYLKVPNFGPVQMRENLRFNGHICSVTISQNGNKIFAAFKIGITQEEYQRTHKIRDCEGTYLGIDLGLKNLITTNDGLIIDAPKNLRKNEKRIAHLQRKLDKKKHPRKKEDKKIFSKNFYKVSAELRKLHALVANKRNDYNQKISTVLASFYQYIAIESINLKGLLKNHCIAKSISDASFGKLKKLIKDKITHQGGTVVEADQFYPSSKTCSACGYIKNDLTLEDRTYICPKCGLKIDRDKNAAINLLHLISKQIIGLAEPKFKPADLEKVEKALSNNLIPHSRVDSGTK

SEQ ID NO: 3076 - protein, 450 aa, unidentified
  REGION 1..450: note = Table 20
MSQVLSHKIRIEANNKFKTYCRKAFGCSRKAYNWGLAEYKKELEKYKEAMSLYRKELGRYEEAPLQFSQVPEKPRLPSVLDLKKRFNSIKAKDFPYMYEVTKYASQQPFIFLGKALNRYYDAKKKKIGKVGFPVFKKRSETSGSFYLGGDQVELQRFKTCSGAEKKSGKLFLRIPNFGWVKLTEELRFSGHVNNVTISQDGDEFFASFSISVQEESIEKKPAPKNTGVGIDLGLDAAITLSDGIKIYAPKPLKKNINKIKALQRKLSRKQHPKTKDDQTKFSKSYMRLLRKIKKLHTKISHLRKDFINKAASVIARNYRYVVLENLSVTGMMSNHRLARSLADVSFGRLKTAIVNKVQMNDGKIIEADRFYPSSKTCCKCGAVKKELKLSDRIYRCDSCGNEIDRDEQASINLLNLIKKSGVANAVRSPELRSILADFNKNQLANLAMKA

SEQ ID NO: 3077 - protein, 436 aa, unidentified
  REGION 1..436: note = Table 20
MTITLSHKIELKANNKFKSYCRKAFGVSRFTWNWALERVKEKRERKEKIDILELKKEFNHIKRKQYPFVMEVTKYASQQPFIFLKRALSQFFEDLKSDKSSSKRRGFPVFKKKSYSSGSFYIGGDLAAVKKGSEIKDKRFGASDNKPYLHVPKFGWVMLREEIRFPGKVNSVTISQDGDKFFASFSIETSEIVYEGTHKANAQEALCGCDWGVKDLLTLSNGIKIKGSKHLKRRQRQLARQQRKLAKKQHPRTKGDKTPISKNYVKQSRKVGKLYRRIKAQRLDENEKISSVLVRHFRVICVETLNVKGMMSNHRLAKAVSDNSPYSLKEMIKRKSALRERTVVEADQFYASSKTCRGCGKVNKDLKLSDRIFVCPKCGFTEDRDVQAAKNLTEVYINRVGSASPELLKNKPVDLTALLDDLAINGLATSRVESGI

SEQ ID NO: 3078 - protein, 436 aa, unidentified
  REGION 1..436: note = Table 20
MITVAHRIQLMPNNKQKTCFRKAIGCCRLAYNWGLAEWKRRYKEGERGLSGRKLRNDFNAIRGEQFPFTYEVTKYATAHAFDDLQTAYTNFFEHRADYPRPHRKKDGEGSFYVGADQAKLSDTHKGMKHLKKVAHNVSGKHHYVNIPNLGYVKMSERLRFNGKLLGVKISQEGDRFFASFQVQITEEEYRRTHPEASREKHGAVGIDLGLKEAMTLSDGIAVSNPRTLRKHQRKITRLSRQLSKRQHAKTKQERLQGVRRSNNYKKLSRRLGREQHHVAAIRRDFTQKLTTILTTTYEAIAIEDLNVKGMQRTKLAKSVSDVAFGELRRQIEYKAAMNGVRVEVADRFYASSKTCSCCGAKRDDLTLSDRTYVCPHCGTVIDRDLNAARNLLSLITNKVGTDYPELTPADLTALHSRFVLNRIATSKVETGRQRKL

SEQ ID NO: 3079 - protein, 433 aa, unidentified
  REGION 1..433: note = Table 20
MYISHKIEIRPNNSCRTIFQKSIRCSRVVFNWALARFLERRAHGICMTSCSLLREFEQIRKQQFPEISEVGVHIYRQAFRTLDRAIASKNPQFKRWKLGDGSFFVSGDRIALTDRPAISDHLDIHSDRKRYLRLPKVGYVKMTEELRFQGRILGVTISRSGERYYAAFSVEITEAEFRRTHGRDMNRRSGVGLDAGLDSFAYLSAGLAIKAPKPRKEYRTIVARASRRLERKHHPDGHSSDTAKSNNYIKETMKLRRLHRKISNIRNDFVQKLSTAIVRYHGYIALENLDVAGMMKTHTLAGSVSDAAFASFRTMLDYKAGWYGKRIVMADRFYPSSQLCSRCGSRHPMPLSRRVFICPVCGLSLDRDYNASLNLYAMIEKRIGKVLPEYTPADLAELQHCLERNRIVHVEVEAGIQQRAEPHRSVGPALPLC

SEQ ID NO: 3080 - protein, 426 aa, unidentified
  REGION 1..426: note = Table 20
MKQISQKIKIEPNNIQKTYLNKCFGCKRFAYNWGVEQYNESIKKGIFKNGYDLKKEFNSLKREKFPFVCEVTKYATQQPFIHLNRAIKDTSKKGGKPIELAFKKKSNNESFYIGGDQIKIVTKPNSNKQYIKFPLLDKPIKLTEKIKYEGKILSCTISHIYSIYFVSFTFMISKEELLNKKAKLAVFKEKALGIDLGVKSALTLSVPFSIHLPEGIKRESKKLIKLSRQLDRKIHPRTKGDQTKKSKNYLKASFRLAKKHLRILNMKTDFIEKVSSVIVKNFDFICMEDLNVKGMLKNHHLARAISEVSFYKLKEKIHSKCDMVGKYFLSADRFFASTKICSNCGNYNYQIKLSDREFICDNCNITIDRDFNAAINLYNYLIKKVGRVTAEFTLVDLTALIRDFDLNHLSTSKVETRNQHNFYINL

SEQ ID NO: 3081 - protein, 449 aa, unidentified
  REGION 1..449: note = Table 20
MENKEYCYLTQKVNLRLNKAQQTFLEDMFYKARFIYNYGVNVFNETLKSSGKILSGGEINLHFVKNKDGFTFLKDVSETLIKRVFENLSKAIIKKVHSDSEDKTLRFKDEKTLFSESFLLSSREFKVVEIPNKTHHYIEIDKNISPIKIKDKLRFKDCPIINGTFKKEIDKYYCCILYKVSRENYIKKLNYPVLTTKNAIGIDVGLAQYLTTSSGLNIEANKPLEKKIRRLKRLYKQLDRKVHPRSADDPTPKSNNYIKLSKKIAKLHTRIANIRKDNVNKIASVLTRNFSAICMEDLSIKDMQKRKSFAKRAQDLSFYELKTKIKQKCALLSREFVEANKFFPSSKKCIKCGHINESLSMYDRVFRCENCGFEIDRDFNAACNLFKYMKNELRWGTSKLKPSEFHKLLSDCDKNKLKYYLQPLGSNQIENKKDVLVSHESQSTPYNYA

SEQ ID NO: 3082 - protein, 361 aa, unidentified
  REGION 1..361: note = Table 20
MYDLKKEFNSIKKEKYPFVCEVSKYASQEPFMDFKDTLTKFYERIRNKEHVKLRYKSKKDVEQSFYIGGDQVKKVNKEGIDKDYLKMPKMMPIKLSEKLRFKGHIVGCRIIKKFNKYYAAISVDVQNIEKKDTKTNKAIGIDLGIKNHITLSNGLVFNYPSSVDKIKKRIKIVQKQLSRKVHPRTKDDPKIFSNNYLKMKKKLDKLYDKMRNIMIDYERKVSNLLTKTFSSICIENLNIQSMKKNHNIAKQLQTISFYRLRKFVENKMDEYNTELVINNRYFPSSKTCSRCGNICIDLKLSNRVYRCKNCGLIINRDVNAAINLVKNVGRVTSEFTPLDLKTLINDAKLSKINVFNIEEGK

SEQ ID NO: 3083 - protein, 486 aa, unidentified
  REGION 1..486: note = Table 20
MKLLIYVFVFISCVSAKVSDQYPHCNQKWCYQPKKMQGITVNISNSFKNLDSNKQKEILSEFENDLIFLQSSIAKETFEKLKTIPIYLEVTRLKADEFPLAMYHYDLKQQKRINDDPRKIGGITFYYSKSAKDYLSYTKSYGRMFMLHEFGHPYIHHLMTQKDRDELLVIYTDAMKKNKITDSFYVGGDQIKIVGKKIHIPNLGLVRLKEALRFSGKINSAVISKTADHWFVSVQVEIEQQINNDNNNLVDRIVGVDLGINKMCTTSDGHAFEAPKPLKKYLRKLKREQRVLSKKIKFAKKEKRELKTAQNFQKQKIIVQKIHYKISNIRRDALHKLTSFLSNNYTEMAIEDLNVKGMVKNHNLARSIQDVGFGEFRRQLAYKSNWKKRNLVIVDRFYPSSKRCSYCGLIKEKLTLADRTFTCECGNSLDRDLNASFNLKQKIGRVPPEFTPVEMTAIQKVVFPLSVTSIDKSGSKHQIVSLDKFG

SEQ ID NO: 3084 - protein, 421 aa, unidentified
  REGION 1..421: note = Table 20
MTRVFKIRCYPTKTQIKKIEQTFGTCRFVWNMYLEYIQKEYANNRPYPNNYEYSKYLNALKNDNPNFHFIKEACSKAVRNTIDDLNIAMQRFFNKTAGYPKFKSKKRNPIRSVFLRNDGRKYLNFLEDNPKYMKLPYYGKMKIKYRKRELFLRPSNDNISSGRLVKEGSKYYVCLIYNKERVDIPKNNISCGIDIGITNYASIYYSDGNYYQQESILKDNRYIDIDNKIKDLQVIINHKQEINYQRLLTDFINKHDGEEPSGKYKNIMKGESYNTSNINKLWIKIRRLYIKRNNIVKDFINKLVNDIVVRTKPLSITVETLKIKDMLENDSSHSLHDLIAKSNWYKFFMSLKNKCEEFMIELRRADKYFASSKKCSLCGEKNKNLTLNDKIYHCDSCGNTIDRDLNAAINLCNLTKYTLVI

SEQ ID NO: 3085 - protein, 420 aa, unidentified
  REGION 1..420: note = Table 20
MEVCYVIKSIKLRIYPNKTQLKIINDTLYACHFIKNEFVAYNKNNHAKGKKYTKGYEFSKIINELKKGDNKRYTWLKGISGSAIQEAILSKENAYNDFFKKKKGYPKFKKRKRVNKESYYFINARHNYYITKNSVVLPKLKKVRITNGDQLPDESDIIFGRIVRQYNKYYVMFIYNEENDNKDIVKRDIKLGIDLGVKNYATIYDGTKFYYINHFKDLDKYKKLTERMTKLQQIVSKKAEYNYGKLLNKYLDKYHKEPNEDEKKKLRKESYNTSNIRRIYIKINKIKVKLSNIADDYIKKLVNWLTAKVKPSQINIEDLDISSMLENDQSRRLHRLVQESNFYKFRIHLTNKCKEYGIKLVLVNTDYPSTKLCSECGSIKDMKLSDRIYECDECGMSMDRDKNSAINIYNCKSKYYKEIA

SEQ ID NO: 3086 - protein, 415 aa, unidentified
  REGION 1..415: note = Table 20
MKKVCKIRIYPNHSQITTIQETLGCCRYIKNLYIDYNQKRYKESGEFISGYAFSKIINKLKKTSNQFEWISNYSSKAIKDAIMEEEKAFKKFFKKTGGYPKFKSRKRINKESFFFIKDNIKYTENKRVLKLPILGSIRITEYGYLPSLRSISSGRIIREYNRYYVMFIYDYNPKGIDPSSIELGLKQYGVVVTNYGNTYKIPHFKNTKKYKTISDKIIRLQQVISHKVEITYAKKLHVYLSTHGEEPNEITKNIMKGESYHASRIRCLQRKVRRLKQTLANIRKDFIYKLVHLLTVRTKPTQITIENLDISDMIKHNGTKDTTLHRYIGESGFYLFRVQLMNKLTECKNIVLRIADQYFASSKICSNCGHKKKNLKLSDRVFVCNYCGFTIDRDQNAAINLLNLTNKDCLVYMFA

SEQ ID NO: 3087 - protein, 326 aa, unidentified
  REGION 1..326: note = Table 20
MSYLSGYDFHKWLNKEYIPNNPNKIWIKEVYSKSTARAMQNADRAYKDFMRGNRGRPRFKKKQTNGSYYLWGNMEVERHKIKLPKLKWVKLKRKGYIPTNLKVVSATLTKEVDRYYISVMFEEDLKSIFKKPQTEGIGIDLGLKDTLFTPSGVHITDLRKNKRLIKLNKSLKRQQRKLSRKQKKSNNWFKQLLKIQRLYRKINNIKKDIKQKKVLEIVKENPQFITIENLNIKGMMKNRRLSNSFHQVGLGYIIEWLKWKCYQYGIELRQVDRFYPSSQICNQCGNKQKMPLNKRLYECKNCGMIEDRDINASTNLKQAKEYTVLV

SEQ ID NO: 3088 - protein, 427 aa, unidentified
  REGION 1..427: note = Table 20
MTRSYKTKLHVANDAQNDFLVLCMAVKRKLYNLYRSVQFGLLETRKRFYPDYDAFKELPKETRNQFYISAAEFEKVFNHVIRVSGSYPAWWDQAPQKTRKQAFRDAERAFQNYFKGLAEEPRFKGYHARQVAYFSGAIRVQRDRIRLPLIGWLRLSEFGYLPTDDRLQKIGYHITGCWVSRWANDYWVVVATDEPAPTQPVAHTETELGLGIDLGIKDMAILNTGKKFINISKTSYYYHVEKMKKRWQARLARRKIAAEKSFAKNHPHQKAGYLTSRGIEEARYYLTRWSAKLAKINKETVRQAIAQIVKLKPPHITVEKLNIKGMKANPKLAPSIQKLGLSYFKTWLTWQCLKHGIELREVSTWYPSTKLCSTCGTYNRAQFHGTMADLAVRQFNCPHCGLSIDRDVNAAINLQQATDYTVLTATE

SEQ ID NO: 3089 - protein, 393 aa, unidentified
  REGION 1..393: note = Table 20
MKAYKTEINPTPSQIELIHKTFGCTRYIYNQFVFENLENLASNKDFVSAFDFSKRVNNDPNTPTWLKEVPSKAIKQSLIYADRAFKDYFSKRSGKPKFRKKGSSESFYLIGTIKVERHRIFVPKLKWLRLKEFGYIPNNISSVTISMKNGRYYISCLCKDEVDERIPLSDYNMGIDFGLKDQFITEDIVIPSINKSARIRKLEQRLKREQRSLSRKYEANMTDKVYYKTGAKKGQLKSYEWLKPLSECKNIQKQKLKLARIYEKLTRIRTEYNRKALRSLVLERKPSSITIEDLAVRNMMKNRHLSKAVSKAQWYQSRIYLENLCKKLGIELRLADRFYPSSKICSDCGFKYKDLKLNERTWICSNCGSEHNRDMNAAINLGQCKDYTVLTAV

SEQ ID NO: 3090 - protein, 475 aa, unidentified
  REGION 1..475: note = Table 20
MKAYRTEIKPTPEQCRYLAQAFGNARWAYNEFIGFNQARYRHRKDGYGDYGYCNAYAVAARYSLAKLLHARVEGNVRKATVAQARLLNELLVCACLPAVDLNTLGPDLARLLLDALTEARQLPRYEPWMDLAHSKSVKQAFINADKAYAKLFANRKTGKTTKGRKGKTLAGPRFKKKNRSKDSIYLVEHIRVERHRIKMPGMGWVRLKEYGYIPIGTDTVSSVTVSRVAGRHYVSCTPKRNTVETHEPRHDGKTDGLGIDLGIKNLAAMSDGTLIDNPNRRKEPRRLSRKLKRQQRALARKLERITVRTYHEEGKDKGKVKQVNYKRPLKECRNIAKTRLAIQKTWQRITNIRHDHMDKAIDQLVGQEPRFITIEDLNIQGMMRNRHLSRTLAEQELGRFVTHLKAKCAEHGIELRQADRWYPSSQLCSDCGYRNTAVRNLNIRAWDCPSCGVHHDRDVNAAKNLKAATEYTVIA

SEQ ID NO: 3091 - protein, 374 aa, unidentified
  REGION 1..374: note = Table 20
MRAYRTELAPTRAQTRLIRQYCGVARFAYNWYLDCAQAYYRETGAFLTGYSFSKVVNNSARPDWFTAAPSKAVKHAIMCAEQAFRRFFAHQGGFPRYKRKGMNHDSYYMIGSIHVQRHRIRLPKLGWVRLKEKGYIPCKGIPKSATVSIVNGRCYVSVLYDSEDAAPGPATGEPLGMDVGLKELAVLSDGTTFGNINKTRRVRKLEQRKRRVERSIARRRRANQGKDGEHGWHNYRKAIERKRRIEQRLTNIRAEHMRQVCNEIARRQPSSLTIEHLNVKGMMKNRHLAPALQKQGLATLLELIGHTCRKHGIALRQVSRWYPSSQLCHDCGYRNTHLTLRMRAWNCPECGARHDRDVNAALNLRDATECHTIE

SEQ ID NO: 3092 - protein, 384 aa, unidentified
  REGION 1..384: note = Table 20
MLRAYCTEIYLTKAQRIQVHKTMGVSKFVKNLYLKVEKDEYEKTGKFYSGMDFSKWLNNEFIPDNPEYSWIKEVSSKSVKQAIMNTERAFRKFFKGEAEYPKPKKRKDSVKMYFVKNNTADCTIERHRFKVPTLGFVRLKEYGYIPLDAKVKSGTIGRRADRYFMSVLCEVDEVQSDNVPTKEGIGVDLGLTDLAIVSNGEKFANINKTNKVKKMEKRRKRQQRKLSKKIKKIKKGEANKSNVQKNKLKVQRLYMKLANIRQEYARHVVNSLVAMNPKFIAIEDLNVQGMKKNKHLSKAISEALWGYFKLFLIQQCRKHNIEVRIIPRYYASSQLCSTKGCTYKNPKTKNLNVREWVCPECSTIHNRDINAAINIRDCEIYSVA

SEQ ID NO: 3093 - protein, 383 aa, unidentified
  REGION 1..383: note = Table 20
MLKAYRTEIHPTPDQSQQIVRTFGVCRYLYNLYIATNQSRYQQGLPFLSAYDFDQWINREYALEYPWIKAVSSKARKKAIVNAATAYRRFFKGLGGHPRFKKKHQQSASFYAPKNNAGDWTIERHRIKIPTLGWVRLKEFGYLPVGSRVTGGTITQQADRFFVSVTVKAGPPAMAEPPSGEGIGVDVGIKEFATTSQGDVFPNINQTAKIQKLERRLRLAQRAGSRKFEERKRQGLPVHGGKNLAKNRLRIQKLSWRLANQRRAYRETVIQALVKTKPRFITVEHLNIRGMLKNRHLSKAIQDQGFYAFKQRLVQAANQHGIEIREVGMFYPSSKRCSRCGSKKLDLTLKDRIYDCPQCGLSIDRDLNAANNLAQAKEYKILH

SEQ ID NO: 3094 - protein, 402 aa, unidentified
  REGION 1..402: note = Table 20
MKRLLKAFKTEIAPTKEQACKIVCSMGICRFLYNQYIAYNKKLYQMYQRGLLDSHQKPFVSANDFDKYVNHTLKQELPWINECGSKARKKTLVNAEVAFKRFFDGLAGFPCFKKKSRYDVKLYFPRNNKSDWKIWRHKLMIPTLKHVRLKEYGYLPVGLAVISGTVSYEAGRFYVSVVVDIDEKSKYNNDLEAIYQPTGEGVGIDLGIKDLAIVSDGRTFKNINKSSKVRRLEKRLRRMQRQLSRKYEFKKKKGGITATASANIDKQKLKVQKLYQRLNHIREDHENKAIHEIVKQKPRFITVEDLNIKGMMKNRHLAKAVAAERFYSFLSKLKRKAEIIGIEMRVADRFYPSSKTCHACGYVHKGLKLKDRVYICPQCGYTADRDFNASLNLRDAKEYRIA

SEQ ID NO: 3095 - protein, 199 aa, unidentified
  REGION 1..199: note = Table 20
KGIGIDLGLKDFAIVSNGKTYKNINKSARLKKLEKKLVREQRSLSRKYENLKKGGSTQKRNIQKQKLKIQKLHHRIDNIRTDYINKIIAEIVKTKPSHITIEDLNVSGMMKNRHLSKAVASQKFYEFKTKLLAKCRENGIELRVVDRWYPSSKTCHCCKRIKKDLKLSDRVFRCDCGYIEDRDFNAALNLRDATTYEVA

SEQ ID NO: 3096 - protein, 393 aa, unidentified
  REGION 1..393: note = Table 20
MTLITYKIEIKPTRKQAYLIDRHLGVSRWAYNFFLEMNQQRYQDGYWYMGAYEFSKWFNNEYLPANPDDLWIKDYYAKSTKQAFIDADTAMKRFFKQQSGYPKWRSYKRHQGSYYFVKNGAKQVIACERHRIKLPKLGWVRFKEYGYLPTDTKYYVIKSGRIKEQAGRYYLTCLVEQPEQLHELLLGVPIGVDLGLKNFAVSDNGIIYSNRNKDYQVKRIRKQLRRTQRKLSRQYVAYKARKMKEGESATDLNLAKTERKVQRLYQRLHNIQADYQNQIVANLVRTKPNWVSIEDLNVKGMIKNRHLAKAVNQQGFYTFRTKLVNKCQQLGIPVHLVNRFEPTSKICHQCGYKKVDLSLGERIYKCPNCGNVVDRDINAALNIRDTDNFVLAY

SEQ ID NO: 3097 - protein, 349 aa, unidentified
  REGION 1..349: note = Table 20
FYTWLKQDYIPASGKIWINDCPSKAVRQSINDANEAYRKFFRKQSGFPKFKKKGSNEAMVYFCRNSLSQPARSTRWYVQVPKLGRVHLKEKGRIPTYVPNEVEIVKGRIGQKNGRWYMSVYVEYEVDSVPSYRKDSDGIGIDLGIKELAVLSNKEVFANINKKRPMKRKLRKLKHLSRIYSRKLKAYRARKKKDPDNRPTRSNLNKAQKRLQAVQQKINNTRNTYRRQTVAHIMDLYPSYITMEDLNIAGMMKNRKLVHAIAQMQWYAFRTDVQFQCAKRGIEFPLADRRYPSSKICHQCGHFHKTLKLSDRTFVCPDCGYTEDRDLNAAQNLRDTAAYTVLDLQTTMF

SEQ ID NO: 3098 - protein, 330 aa, unidentified
  REGION 1..330: note = Table 20
MVYFNHSQKKFLDPLKVVGIDVNKAMMVCSDGRQFENQQFNSKYEVPELKVKLEKVEKGSKEEKLLKAELRKALKAAKEERENFFKELIPKMISLGTDAVCIEKLDMAQMYEAADEKLKEDLQDLGLSVFYKELISLCKKNNIPVAQIDVHIPSSKLCSFCSFKYEELKAQKYWVCPHCDTKHQRDYNAALNIKEAGINELKKRGFKFMKVTFCTISKPEGGFSSCGFAVSASDGLVLAFSEKLQREALKRLEVEYSKPNLKEHPYFGRKNKIQLQRLLGFDHSKGFITIEGSCVPELRWLLLELGFKMQIFIQEGQTPSPNIYFLERLR

SEQ ID NO: 3099 - protein, 407 aa, unidentified
  REGION 1..407: note = Table 20
MTTKDTYYSAMTGIKLYPTFEQARFIDRCIDGYRIVYNWALMTEYMQYEKFNSNTSDKSFLSFYEMCELYRNEFRPNNDFLKSLPDHSMLNAIKDMVKGYESFFRNKSIFNKPRLKDGNEYISSYRPRSDVMSFYFNDNYVRIEGLSYKETIETSYHTGEYFKDYIRYYNPIIFRNNRTGEYFLNYVVLKRKLSNYFVENNIPKSEPIGVDVNKHIMYACSNGLNIYSVDTTRVEKHLADINKQVSKDRIRFEEIKKENPDAVPSNNSIKRLEKRKKIYRHLYNIHKNTAYQGSLQIIRLNPAAIIIEDLDIKKIMSYKYIADDLQFYPLGQVQRILKEQANKYDIPIVYAPARFESSNYCSNCGAYKDSQGSKIFVCDCCGARIQRDTNAAINLRNWYLQSTGNLT

SEQ ID NO: 3100 - protein, 391 aa, unidentified
  REGION 1..391: note = Table 20
MKRCLADTSNLYGYRIKLYPTDEQVKVLDNLISQYRFVYNWTISEMNLYYEMTGGYMPINDACQRFRDFRNSHEWLKSLPSNTGRHAIMSVYHSMSMFWKKVAKFPKFLTKKDSKQYFKIRGERLWFRDDHVSFEGIGGHGKSIKCGNIKLPFRIESCRFYACTVTFDGYNYWLSFNIEKHAPAEFYSDTGVLGIDVGLRKLAVLSDGTEYVMPKADWLIKRKKKLQRQLVKDRNRRIKAAKQARAKLDDIPETKNMLKHKKQLRQVCNKEANIRHTFIHQMTSEIIERAPSAIVMETLNVKGMLKNKYLAKYISSACLSQVFHQIEYKAKRNPAIKVIRASRWYPSSQICSNCGKMHSPGDREWYKCPYCGFEIDRDLNAAINLSKLANG

SEQ ID NO: 3101 - protein, 392 aa, unidentified
  REGION 1..392: note = Table 20
MAFKTIADPERLVGYKVVIYPTDEQKAEINHIINVYRGVCNLTIQFQNEAQENNEYISYYKMTNRFSHLMKEKEYSWIDISLGMVRQALLDIDRGYKKFFNHQCNHPRFKSKKKDKKSFGVRCDRCRIMGKYIRISGLKSGDGWIYASNHNIPEGKRLYVTGIEFDDYRYWFFCKVEMPMIDMSDIPKSDPIGIDVGIRKMITTSDGEIYQLPDTYKLEKRRRRQQKRLSRYQNALMKEAIHTRTKYEDLPRSKSMQKLMKQFRKTCNKITNKRDTAIHTATKRIVDKNPEAIVIENIKVGNILAKGKWMNKFIPQLLFNKIHTQIRYKAANRGIPVIIADREYPSSKTCSGCGYVYKSFASQETFICPCCGLRIDRDINAAINLRNLAYSN

SEQ ID NO: 3102 - protein, 379 aa, unidentified
  REGION 1..379: note = Table 20
MNKDDMVYQGYKLPLYPTKEQKDKLEVIFNAKIKIYNWAWEQQKRLLDNDEKVLSRIPLRNMYVKMAKESKDFSWMLGVVPDHISYYAIDDLNNQIKKVLTKKAKKVNFKSIKDKKKTFSQRNDIKLFRKDKVQISKIGLVKTNKHMLDRVPEIPNKKYLSGVRITKNHNEYYISFNVLIDKSKPVKTGEVIGIDLGITKLMVTSNGYEVNRPDDKVLKYEKKLRRLKRRAGKIYREGRRSKNLDKLEKEIVKISKKIENILRDNINKEISYILSSNPKAIVMEDLAVSHMLKNKYVSTQLMRAKFRYIRDQFQYRCERQGIDFMLADRWYPSSKICSRCKEHNHLGKGQRIYKCKHCGLEIDRDLNASINLKDLYFTK

SEQ ID NO: 3103 - protein, 382 aa, unidentified
  REGION 1..382: note = Table 20
MIRGYRIKIFPKEEQKKMIHKSFGCTRFIYNWCIDRISENYNETKKTLSSIELQKEIVILKKQVEYSWLNEVSANMLKQVTIDCSNAYKRWFKLIKQNNNIKGKPRYKSRKSKQNCPTRTDRMTFNGRYVHLEKIGVVKLSKVKIALDGKLMNARLSFDGLDYWLSFGVEYKDVQLEEKPKTEPIGIDLGLKTLVYCSNGNTYEKPHTKIIDKKIKHLQRRISKIYQPMIDYCKETRTKFSTLKKSNNLIKLEKELRKYQIRKTNILDSNIHRITSDLIKINPERIVIEDLNIKGMMSNHKLARSIQSSKFYEVRKQLVYKCKNNNIKLIVADRFYPSSKTCSSCGKIKDDLKLKDRVYRCPQCGTIIDRDLNAAINLSRIS

SEQ ID NO: 3104 - protein, 379 aa, unidentified
  REGION 1..379: note = Table 20
MIKGFKTQIYPNKEQQEKIIRFCNASRFAYNWAIAIEQDNYKNGGKFISGYNLTKMFTQFKKQEGNEWLKEISGRALKVAILNAGQSYENFFKGRAKYPNFKSKKRSKKSCATHEGTTIIEKKRIRCEKLGWIPSHKHNIPIGENIKYYNHKLSFDGINFWFSVSVELEDYKNTKPKTESVGIDLGIKTLATCSNGIICKKPNIKKEQKKLKRLKKRASKRYQKMIDYSKQTKIKFVKLEKSKNLLKLEKQILKQYQKINNKLTTNIHTFTKSLINLNPQAIVIEDLDVNGMRKNRHLSKSINEAKFYETRRQLVYKCNWYGINLVIADRWYPSSKTCSNCGCIKEKLSLSERIYVCEDCGLIIDRDLNASINLRNLAM

SEQ ID NO: 3105 - protein, 371 aa, unidentified
  REGION 1..371: note = Table 20
MLKAKLIPLKPNKSQEKQFWEFCSTARFVYNECLAYKISAYEKNGISLGVQDLIEHIQQLKSTEEYSWIKNTPEAVTKQAIKDLNRSFLNFFNRGNKGFPRFKSKKKTRPSFYQRTDRIRQIDDRHIKITGISDPVKCSSFVMPDKVVNTRVFFDGKYWFLSYSYEVSELEQNSSGEIIGLDLGINNLAISSDGKIYPNINKSERIRKLLKKKKRLQRRLSKKYRINSNKTNNILKLENETRLIDRKLRNIRNTYIHKVTKDLVRNKPEAIVIEDLSVNTMMKNGNLADYIQQQEFRKFRRYLEYKTKENGITLIVAERFYPSSKICSCCGKIKNNLLLSDRVYKCNECGSMIDRDLNASINLKNYYKMVY

SEQ ID NO: 3106 - protein, 391 aa, unidentified
  REGION 1..391: note = Table 20
MLKGKRIRLYPTEEQAQTFFRYAGAARFAYNECVAYCKAQYQAGRTDLVKQPELRQHLRDLRDNTPSYEWLREIPVSVVSRATKTFDRARAKAFKKQAGFPRLHKKQLSKASFYQRTDRIYTTKHGVKITGVKEPVYVKFRKIPDHILNPHIVWDGKYWYLSYTYETGTEPAKPRKHGDTLGIDLGIKNFAVVSDGTVFSNINYSKEVKKLEKRKRHLQRRLSKKLESNKQGTKFVRTSNSNKLQRKVALIDRKLTNIRSTYINEVIKDILSARPKRIVIEDLNVRGMLRNKYLAKSIASQKFAEFTTKLAQKCEETGIELVKANRWYPSSKTCSGCGFKKQDLSLAERIYTCEHCGLVIDRDLNAALNLANYPSVAGKLSPGRIKPTLVA

SEQ ID NO: 3107 - protein, 420 aa, unidentified
  REGION 1..420: note = Table 20
MLIGKKVCLQPNKAQAEAFSRFAGTGRFAWNESLAFYMSVFRDEGRYATLSDMIHHLQELKHNDSDYAWLNAVPEAITKQAIKDLLKAFKSYYNKRKQPGYVPYTREQIEHAARIGKELTGYDQQGHPKFKKRGKCMESFYQRTDNVHKTDDTHIKITGIKKPVRCTALQGIDLPEHIQNPRITFNGKYWYLSYSYEVDDADVIEDPQREVLAVDLGIKDLAITSDGKHYRNINKDPEIKRLRKRLKHIQRLISHKYEANAVTDKNGKKVYHKTNNIKKLEHTERMIYRRIRNIQQAYMYEVINSMLRTKARTVVLEDLNVKGMLQNPKLAKAIQEERLYEFRRIMGYKCERNGTELVIADRWFPSSKRCSCCGNIKHGLKLRDRTYICDVCGLVMDRDENAALNLEQYPGIIKGRSKAA

SEQ ID NO: 3108 - protein, 411 aa, unidentified
  REGION 1..411: note = Table 20
MRSQKIRLRLTTDQENKAWQYAKVSRNYWNLLVEVDRRNNKGEFDDILSKRGNTTYYSKFHDREVYRLNQSDYRYLSDYLIAENYEKDNEKWAWYYEPNQSFIFNSIAKKLVVVRKHNKGKLNFRSVGKHIPSFNVRCDISANKKRPSRIYLKDNGKLQIPTLGDVKIGNTRKDFDLSCKKQVAQVSFDGKYWYLSYTEDVDTVVETMEFAPGVGVDIGIKNLATLSDGTVVPNIKTFRRVRILNKRLKRLQRKLSRKYLINQCNKHNKTKNIMKLEREIRLIQRTLRNIRINHIRHFVSQLMKKRPKYIAIEDLNVKGMMKNKHLAKDIANCSFYTIKEQLIRKAKERGIVVRLVDRYYPSSKTCSCCGSYKKTLKLTERTYHCDTCKHSIDRDLNAAYNLANTNCYQLA

SEQ ID NO: 3109 - protein, 413 aa, unidentified
  REGION 1..413: note = Table 20
MLMGIKIRLIPTKEQEIQFKISAGTSRWAYNFFVFTNKKQYKLYKQGLSNKSYVNGSEIRKMITKMKRTAEFEWLNEVSANVTKQAVKDADSSAQRHFKNPKRYGFPRIKSRYTNESRFYVNYETLKRTDVGFQGEKLGNVKTAKPLPKLKPHRKYSNPHIYFNGKCWMISFAIDVKDLTKEANKIYWKRINKFNDKTTTHEIIGVDLGIKELAIVSDTTGTKIKHYENINYTKEVRRLERRLKHEQRALSRCFESNVAYRDANNKPHFKRKLYECKNYQRQRKRMQRVATHLSNIRENYVQQATTDIVKHKPQRLVYEDLNVKAMMKNHHLARHIANQCWGLCKKCLEYKCKRLGIEVVKANRWFASSKTCHVCGHKKKDLTLKDREFTCDNCGTLLDRDENAAINLANYVA

SEQ ID NO: 3110 - protein, 394 aa, unidentified
  REGION 1..394: note = Table 20
MYIARKIMLLPTKEQEKYFWKATRISRFIYNWYIAINQPFLNFKENAKLIKNFEASTTLTLFKKIEEFKFLNEVSSRVCRQAITDGYNNIQRYLNKLSKKPKFKSAKRSRPSFYVDYERFHKTQNGCFIDKLGNVKTVEPLPKISCKHYSEPYVVYENNHWYITFTYEIEDKTIKQKGKIIGIDLGIKDLAIVSDKRIFKNINKDKYIRRLQKRYKHLQRSVSRKFNANVETKNKNGKPTKYKKPLRECKNYQKALAKRNKVLNRMTNIRNNYIHQVTTRIARTKQIKRVVMEDIKIINIVKNKHLAKTIYESKWYMFIICMKYKCEKYGIEFIQAKSTFPSTQKCSRCGNVRKGKDKLTLKDREYKCECCGNTIDRDLNASINLSKIDKENIK

SEQ ID NO: 3111 - protein, 355 aa, unidentified
  REGION 1..355: note = Table 20
MLIGKKIRIKTTPELEILLRKCAGVARFSYNLMISLNNSSQKFIKESDVRKYVTGLKKQENYSWLKEVSANIPKQAIKNCGKAYSDYFKKLRGKPKFKKKFKNDRFYVNYESLKKTNLGFKAEKLGEIRTSEPLPEAKQYYNPYIVYDNKYWYLTFSIETECIKEQLNDFTLGIDLGIKHFVVTSQNEIIPNINKTLTMKKLYKKIKRYQRKLTKCLKNSFNRIKVLKQLQRLFRRQKNIRNNHIHQATSHLVKTKPSKIVVEYLRVSNILKNKRLSKAISESGFYEFRRQLEYKCKLRNIKFMLADTFFPSSKKCSNCGNIKKDLTLKDRTYKCDCCGLEIDRDYNASLNLSKL

SEQ ID NO: 3112 - protein, 353 aa, unidentified
  REGION 1..353: note = Table 20
GAARFAYNYCKRMSDRYYKLFGKSVSQLALQKRFTKIKKRKRYEWLKDINAQVPKQASKDFDTARKHSFKKYKNGSHTSYKSKKDLIQGFYANYERLVIGKKVVHIQSIGEVKTSQQLPRNKKTSNPRVTFDGRHWWISVGFQEDFESQELTNESIGVDVGLKELFVASNGMKERNINKDAKVKKLLKRKKSAQRDMSRRFKKGVKIQSTGYEKAKAEHLRLSRKITNIRNNHIHQATAKLVKTKPMRIVVEDLPISNLLKNKKLSKAFSFQKLNFFFQCLSYKCEKYGIEYVKADKWFASSKICSCCGVKYDHSVQPEGQWSLKIREWRCASCNSHHDRDVNASINLSRWVK

SEQ ID NO: 3113 - protein, 361 aa, unidentified
  REGION 1..361: note = Table 20
MKKAIKIKLFPTDEQQELLFQSCGVARKAYNLCKELDLQYLKQFGKGINDRDFGPLMTQIRRGDDFPYMKLVSADVAKQAVKDYIAARSRSFKNFKNGYHVNWKTRKSKLSFYADYVKTKVKRKAVYISMIGDIKTSSQLPRNFKLGNPRVSYDGLSWWISITTEVPKPEQVELTDVSIGLDLGLTTLVTTSDGQTFDNIMKSESVKELDKKIKQYQRALSRKERGSKKYQQTYERFLKCVQKKTNIRRNYAFHVANALVRTKPKRIVMESLSIKHMLKNKRLAKAIHDVAWYNLQTIIIQKANFFGIEVVKVDSRFPSSQLCCVCGNRQPMPLDKREYNCQHCGISINRDLNAAINLASI

SEQ ID NO: 3114 - protein, 378 aa, unidentified
  REGION 1..378: note = Table 20
MSYRAIKIKLFPTREQEKLLWQSAGTARFAYNWAKKFADTYYRLYKKSLNAGKARKHFTKLRNRKKYAWLKEVSSEIPQQAIKDYFEALNKFFKKIAGYPGFKSRKRSTVSFYHSNAKFTVSDNVIKLEKIGEIRMKDDNRLPRGNYRRDKSKVCNPRVKYNGKYWYISLCVENKYEKCKLDKDLSVGIDLATVSNFEKSFGNINKTQRVRRLKKQLRRLQRQVSRKYEKNRSGNRYLKTNNIMKLERKIKLLHKRLSDIRLNYLHQVTISIAKTKPYRIVMEDLNVKGMMKNKHLAQAISEQGFAKFIELMKYKAEKFGIEFIQADRFYPSSKICSHCESLKKDLKLSERIYHCSCCGFTIDRDKNASINLANYKLA

SEQ ID NO: 3115 - protein, 158 aa, unidentified
  REGION 1..158: note = Table 20
MGGKPSKDKIRAEFNNTIKKDTQYVWLKEVSAQVTQHAFEDLNKDLSIGVDLGVEKLAVINCLDKPIKNINKSVKVRKLKKKLKRLQRGLSRKYEANKKGNEFVSADRFYPSSKICSSCSSKKEELKLKDRIYVCDECGLEIDRDKNASINLGNYKIA

SEQ ID NO: 3116 - protein, 241 aa, unidentified
  REGION 1..241: note = Table 20
LSFSYEVPEQETENLTGDSMGIDLGIKVLATCYTSGERKATVFKSINKTKEVRRLEKKLCREQRKQSRKILANTARYETVQRKGKKPGRKPIWKRPLRECQNIEKGRRKIALIHRRMANIRQNHIHQTTAAIVKTKPSRIVMENLNVKGMMKNKHLAKGIAGEKFYEFRRQMTYKCENNGIQLVFADRFYPSSKTCSCCGHVKENLKLNDRKYVCQACGTVIDRDLNAAINLANYFQSETA

SEQ ID NO: 3117 - protein, 395 aa, unidentified
  REGION 1..395: note = Table 20
MINALKMRLKPTKEQQELMLKSAGCARFAYNFMLTYCSEYYKTGEKKTSTNARDVLTQIKHETYPFLEEVSADAWRNTSQDLMQAFKNFFEGRAEYPQKKTRKNKKSFFHDNRKLEFTKTHVKLEKIGWVKYISDQNPPLGSYKKLKIKVSNPRISHDNLHWHLTFGIEQETAKLEPTDLELGIDLGLKDLATLSTGEKVANINRSKKVKRLKKRHKRLSKQISRKYEDNKVEIKEETKKDKPKYKYVKTNNIKKLEHKRRLIERKLTNIRNNYTHTFTKQVCLRKPSKVVLEDLNVSGMLRNKHLSKAISECKWYEIRRQLGYKLLKYLGIELTLADRFYASSKKCSCCGYKYNQHDYNNIPWNLKIRSWTCAECGTTHDRDINAAINLANYTM

SEQ ID NO: 3118 - protein, 417 aa, unidentified
  REGION 1..417: note = Table 20
MSEEKYKRINIRLLPTKEQEELMWKSVNNVRFIKNYFIARCYEEKDKGTFINLSLEKDFKKELTYITKLNEYKWLTESDRHSKVVAIKDVLNGFVRYYKGIAGKPKFRKRGLTPNTFSVRNDVMPSGLCRFRRDGNTFKVSVIGYIKYSKRSFNNFKHIFDIIEDKDKFYSPVIRHDGKYWYISLLYKDNLVTNQKPRELTDEIIGIDLGLRTLMTCSNGIKVRNINLDRKVLILEKRERRLQKQVFRKYDMNKQGNKYVKTKNIIKLERKIRHIRRKLKSIRNNHIHTETKKIVEMLPKEIVIEDLHVKEMLKDKWRRHEIQYAKFFAIRQILSYKCKDRGILLTVANRWYPSSQLCSNCETRVTGKQKTTIKSGYHTFKCKNCNHNLDRDLNASINLKNYRYSNWYRNNIIEKQQ

SEQ ID NO: 3119 - protein, 427 aa, unidentified
  REGION 1..427: note = Table 20
MLEEKYKSISIRLLPTKEQEELMWKHVHASRFIYNWGLYTWEDMYKKNEKPSSNKIAKKLKHLKSGKKWLYTISNKTLVKTLQDLEKNYKMYFSGISKLPRYKSKKTSAYTFPIRTDKPNGLNTTPMPYINLKNKTISIEKLGKITLSNSYTRFNIDFSNIYFYSSRVVYDGKYWYVKLNYKVKPRKTRELTNETIGIDLGIKTLATCSNGKSYKNINKSSKVKKLEKKLSRLQRQLSRKYEMNKDYLTGCLLDKNGKPKINKSNGEVIQKYVRRTKNIIKLEREIKLLYRKLKNIRNTHIHTMTKEIVEQLPQEIVIEDLKVNNLRKNKHLSKHINEVKWYEIRRQLIYKCEDRGILLTVANTYYPSSQTCSCCGNRLTKQDKLSLKDRNYKCKECNTNLDRDYNASINLKNYRYSKWYQDNIISQ

SEQ ID NO: 3120 - protein, 384 aa, unidentified
  REGION 1..384: note = Table 20
MELRNVKILLIPTKEQRQKFYDFSYYADLMYNQAIDWNNELYDSEGIFYSKFDLINMLPAFKEEHPEFASVDSFVLKTAVTDFRTALNRMKHGAKYPRYKKIGKQLSFGTRNDRLKVFENKVQISSIGIVKCKHCHWLTKTKTDEELACMSWHNPRVKFDGKYWFLSVGVEVDLTSDEVTDEIIGVDLGVRKTIYTSNGITKPNINNSRKVVNLEKRKKRLQKKVSRKYELNKHGKKYIKTKNIKKTERQIRLIDRKLSCIRENYNQTITNELIALHPKRIMIEDLNVSGMLKNKHLSRSIQQQCFYRLRQLLIEKALNTTTTQIGVVDRFYPSSKTCSRCGYINRQLKSEEIYKCPKCGLIIDRDYNASINIRDCKDYKIVAN

SEQ ID NO: 3121 - protein, 412 aa, unidentified
  REGION 1..412: note = Table 20
MMRGFSFRLIPTKEQEEYFWKASNAARFIYNWSLAEKKRLYTEEGISLSGYEMCKLLTQLKKQPEYQWLNEIHNKVLKKAVLDCDDAFTRMFKGQNRFPKFKSRKNCNISFYIETDIQNCGAVLLENGTIEYKSIPKIKFDHTNKVKLSGIGWVQLSNHAKEYNLWALTENLITISNGRVKFDGEHWNLTFAVDIPKPKKQLTDEIIGIDLGVKDTAICSNEIVYKNINKTSKNIKRLEKRKKRYQRQISRKYEMNKFINPDTGKPKFIKTNNIKKLEAKTKRIDRRLQNIRKTYNHQISREIVNRCPKAIVMENLNIKGMMKNKHLSKAIQQQNLYQLKTFIKYKAESQGSNFIEVPRNFKSSQICSKCGAVHKMNLNQRTYICLECGHIEDRDINAAHNLENYGISLLQA

SEQ ID NO: 3122 - protein, 384 aa, unidentified
  REGION 1..384: note = Table 20
MKTLIIRIFPTEEQERIIWKHIGACRFIWNWSLENQIKEYNLTKHRIGHTKICKELTKLKSLEEFNWLNDISITSLQQSLRELDRAYNDYFINGRGFPKFKRKKDIKKSYPVESRKFYFDGEFVQIAKLGRVKFRSSYKFNMPDGNYVYRFHNVRIHYKNHKWLLTFVVGDDICDNQANKKELNKYSVGVDLGIKVLCSIAVDDKNIVVPNINKSYRVRKLESKLRHLKRVQSRKYNQNGRTFEKTNNIIKVENEIRKVYYHLKKIRKNYIHQTTTMITNLYPKSITMEDLNVIGLIKNRHLSKSIQNQYFYEFKRQIEYKSKDRGIEFILADRFYPSSKTCSCCGNIKKDLKLSDRTYRCSECGLIIDRDYNAAINLMRYSKH

SEQ ID NO: 3123 - protein, 424 aa, unidentified
  REGION 1..424: note = Table 20
MNIVHVQSTPIDNTMVKSYRIKLIPTEEQEKMLWAHVDAMRSVWNWGLSVNMERFRNGEKHLTKMSLGKILTELKQNDEGFKWLNEVSVQTLAMALLDLDNAYAAFFGIQKKGPKYTENKIKKFKIRNKKLTPYEMNGHPKYKSKHEAESKFYTRNDGVYLLKGSVVLEKIGRVKYQTNYAELPIVGKRSENTTKYINPRVRYESGKWILSFGIERESAKRELNDYSVGIDLGVSDLAVYSYDHGTQSGRAKNVNKKKHVRRLKKRMKRRQRSVSRKYRANGNHEKTARIVKEEAKIKKLYRKLANIRHNHAHHATSEIIKLSPGRIVIEDLNISGMMKNKHLSEAIAEQCLHEFRRQIEYKAKWAGIEVVLADRFYPSSKKCSSCDAIKRDLKLKDRVYKCDECGLAIDRDLNAAKNLEMYAV

SEQ ID NO: 3124 - protein, 271 aa, unidentified
  REGION 1..271: note = Table 20
SPKFKSKGKSKPSFCTRSEKVKVDEKDRIYLEKIGWIRYKFQENLSGVKFHNARVKFENGKWLLKCAVEVLPEGSKIILRDVNMGIDVGVKSLAVVSCGGRKRVFKNINRSHKMKRLIKQLKHHQRILSRRKKGSKNYLKEKYRVQNLYGRIRRRRHEYTKQTASKIVSMRPKVIVLEDLNIQGMMKNRHLARAIAEQNLYLLRTLIESKAANLGIEIKFADRFYPSSKTCSNCGYVKKDLKLSERIYKCPECGEIIDRDFNAALNLERLA

SEQ ID NO: 3125 - protein, 434 aa, unidentified
  REGION 1..434: note = Table 20
MLHHTQHVIMGVEADVDGRQVNLLLKTLKVRLYPTQEQEKLFHSFVGCSKFVYNYVIRKQKENYEQGNKFINYYDFKKQFTQDKKEYSFLLECSNQTLDGTMRDAFKAYENFFDKSRKKLSGYPKYRTRYEKKFYTRYDKVKFGINLDAVKDRNTISRALKNKPPDYDITKRVYFERIGWVKVAEPERFIGINSFKNPRVKFDGKYWYLTVAVELHSPKITHTEEVLGVDLGVKELAIVSNGSRYANVNKSVKMQKIEKRKKRLQRQSSRKYQAQQTKGTAIQKGEKFKKSNNQKKLEAKIAKLSRKQANTRRTHICQAVTDLVKTHPRAIVVENLNVVGMLKNGKLAQSIQEQTFGAFLKQAEWKCTQLGIELIKADRFYPSSKTCNSCGYIHKELKLSDRIFKCPSCAYVKDRDENAADNLRDYGKLLLQTA

SEQ ID NO: 3126 - protein, 404 aa, unidentified
  REGION 1..404: note = Table 20
MIKTIRVQLLPNNKQKTLLKKCADVARWAYNWALSKQLENFKNGGKFINDEELRKELTQLKKNPEYNWLNEVSAQIPKQAIKDLCIAYKNFFRIENKHYSEKTKKKALRQGRQLTVYDLEGHPKFKSKKDVQQGFYHREDLGHLKFKGDKVKLEKIGWIKLSENRIELQTAEKFYNPRIKFDGFNWFITVSIDYKPTNNQKYSDGIGIDLGVKDLAVINDGRKIPNINKSQEIRRLNKKLKRLQRKLSRKYEKQKEGGVNRYKKTKNIIKLECLIRKVHKKIKDIRTNYLHQETAKLVKAKPEFVCMENLNIKGMVKNHKLAKSVQEQMFSEFRRIMEYKCKWNHIRFIVADRYYPSSKTCSECGYILDKMSLSTRKWVCPECGIMHDRDINAAINLMKYGKSA

SEQ ID NO: 3127 - protein, 406 aa, unidentified
  REGION 1..406: note = Table 20
MVKTYKTKLHLNNKQRTQLFKNAGVARFAYNLTLSIQEDNYKKGNKFLSDCDVRKIITQMKQDELKWLYDFDCNIVKQSVKDACQAYKRFFKLKKGKPRFKSKKHTRPSFFIDGWGLKIQNGYIKIPKCTKIKLYEKDYIPEGLNYLNPRITFDGISWFISVGVKEEQPRVQLTDEIIGIDLGLKELATCSNGMIFHNVAKFASYKRVEKSLKQKQRQLSRKYLLNKQGNKFIKTQNIIKLERLAQKKRIKQNNIKQDYFHKSSTALVKTKPKAIVLEDLNVAGMRKNKHLSHAIQSASISMFKTILENKATYLGIEVVHADRFYPSSQLCSKCGNRKPIKLSERTYKCTKCGLEIDRDFNASINLKHYLEFQGKLSLWRAKENQSSFGKMGFSEEGILQEAVNAV

SEQ ID NO: 3128 - protein, 435 aa, unidentified
  REGION 1..435: note = Table 20
MYTYKVVLHPNNKQQTKLKMIMNKCIEAQNIVYDYLDSLMHKNKLEHERTGKYIKLPTCLEVRRWFTIQKKILDEEVLEKRASMTKKMQRENHLDFLFYDCTNDALKQTVKDTYRSFMRFLKKESKYPVRKRYSNVKKSFYVDPYKIEFSAKKVKIEKISNSTKQNRRVLNLISLAERGRIPTNCEYYNPRVIYDGYRFYITVSVSDDNAPLKYKEKMQKINKGNEVIGVDVNINDIVTSNKAGTITTSFSSINNTNKVKRIERRIRRTQKSLSRKYENHKITHKSLKESKNYVKTKHKLHNLRCKLNNIRDAYIYYFLNKLLFIKENTLVKKIVVEDLDVKEMMSKENKGQNKYLRPLLQKTSFGKILEKIKEKCKFYNIELLQANRYYASSKICSLCKNKKIDLRLSDRIYRCDKCGLIIDRDLNAAINLANY

SEQ ID NO: 3129 - protein, 412 aa, unidentified
  REGION 1..412: note = Table 20
MYTFKVMIHPNNKQETKIRRTFNKCIECNNIIYDYLDSFIKNNEKIPSCGDVRKWFTIQKSIKDNEVIEKRKGLTKKEMISNHLDTLFYDVSNDALKQEIKDTYNSFIRYFKKLSKYPVKKKYNNYKKSFYVDPYKIDFSDKKVRLEKIANSQKQNRQVLNWINMAEKDRIPLNTNYYNPRVVLEGDRFYIVVGVDDEYAPKKKIETTSNIIGIDVNVKAIVTSENVFYKAVTFDNNYKKALKKEKRAQNKLSRKYIKSQELKKSLKESKNYNKQRRIKNKYTKRINNLKEAHIDYVIASLIHQRPKIICIEDLDVKGMIESEEYEDVAKGIQQNPFRKFLKALEDRCNNYGIKIIKVDRYYASSKTCNKCNYKKKDLKLGDRIFICPNCGLKINRDYNAAINIKKYALVNN

SEQ ID NO: 3130 - protein, 252 aa, unidentified
  REGION 1..252: note = Table 20
MKDACEAYRDFFKGYTSFPRFKSKKHSAPKFYQDNVKIQFTDTHVKMEGFSTSRKKNKQKLNWIRLAEHSRIPTENVKYMNPRIKHDRLNWYITVGIEYESSTSLPSNEGIGIDLGIKYLAICSDEHKYLNINKTQRVKKLEKRKRRLQRSISRKYENNKEGGSYCKTSNIIKREKELLKLDRRLTNTRQNYLHQTTSEMVKQEPSFICIEDLKLSDRIYRCECGNVIDRDYQAALNLKRYGEMILKQQSVA

SEQ ID NO: 3131 - protein, 976 aa, unidentified
  REGION 1..976: note = Table 20
MNANEKDKDNLDKNNLLKAYKYRLYPTKTQEELMDKYFTASREFYNIALEDRTIKFYSALTGEAILTYKEIDEKCKKLLVDKICSKEDNKKEIAQEFFELSNEDQITDEEAIREQIKGGTLYECGTLYKNLYKKLGNEDQRKIIGLVLRILYKPDNNLSQSAENCVPKVVANLEKLISIKTIEQEFYVYYKNLNPECQGPNADYETVLSDLDKKKIARELIELFLKKRKRENPKERNNVKEEIKKKHREIKNRDINIKINEYIKKLIEEQIENKTLYTDLDKNDQNKIRRLWLKLLYEPYLKFNKVLSSDLRSEILEKSEKNLEKFIEEIYGRLNEEHKAALIRELIKNKAEKIIHSEFGTSLKKKQEKEAINNLLGEINNKLLNESAYITVNEVIRNYKKDKGNRGELYLDKVDKAMLDSVYDDLNTVFANFCEGKFSKKIDPKKGRSSKGTAEYPHRRVENLNSFTYSDEDEVKQCKVIFEENRLYHPLFPKANHSSADDSKGGIRCIVHRPYDKSKKFVLEKCTISQKLSGKYYVVIVIDHGEVTKRPREISSIKEEEVIGIDIGEKELGLSTRKLCIYPEGKIKNPIEADQNYSDKKTKKTYNNKAEKRYQRLERKKACCRNKFEKLEKKSSEGKVLSSNEKEKARKKLAILNERITNKKRDYWHHQSINLLLKDPKQRFDKRNEKDQIEWPLNDIEINKDGVLVGRVNLGNPSKDWRKHQLGKFKEFLEYKARWYGVHYLEVNESGTTNICSACKTKYTANEVEGIEIKEWTCANCEKKHREGDTIIKCPNPDCKEERKNSRDLLQDEILKCVNCGKEHEREAIKKTAMGEEKCPYCKHRGKMKKIKWKCGRCKTENDISETVVKCLDCNKEYPYDRYEDMLQRKWTCKKCKKEHDRDENAAKNIARITLEEMKKEPSKTKESADKLMKGKGGYRGKGGGNSEHHKKNKNSHPAQKKYGVNQKYKNKPNNH

SEQ ID NO: 3132 - protein, 632 aa, unidentified
  REGION 1..632: note = Table 20
MPKSDKPETLNKAYKYRLYPTEKQKVFLEKHFNSVRYIYNTSLNNREVKFKEAVLKHCGKNFSLDFYKKLSKHRQIKFDKGISQKYNRYIKTLSTKDKKKFFDDLQKIFKTVKQLTNDYIKKSKDYKYKLDLKRVSSESLNWALRNLDTAYSNFYFNQAKFPKFKRRNDNKSFQNHNGNKIIFPDLGTSGKFYCNKFSERYKELKKEYQSVKTIKNIEVLSDSQKNFYKGVLKEYKKIYKIAFNELDQEDKDNFQKEIIKKYDIKGSNLNFFSNLTENEKEKFHEGIIGKYKVLDNENGIKCVVHREFDIIKNENDEIIEPKIKTCTVSKTKSGKYYVSVLVDHGVPINPPVKKDMATTVGIDIGLKTHLTLSDPINKKYKISNFTKPGQKEYAHYEKLCKKEKKLERMLARKVSHRKVVQNKKVYRTDNYKNLTPEEKRKKHKELNSRKPTKHEKEVSNTYSKNREKVRLKLAAVREQITNWKKDAWHNRSIELVRRYNTIALEDINLQSFHKKKKNKDNKKDTKDSDRSKKKSFKNSESWRNASLSQFRTFLEYKSKWQGKNLVLIDRFAPSTKTCHHCGHKNKNIGIKDRTWKCPNCSMTHDRDKNAAINIKKWAHDETKLSKKNLDKK

SEQ ID NO: 3133 - protein, 519 aa, unidentified
  REGION 1..519: note = Table 20
MAQIKTSIVEGLALGVVSQKTMRKLHVNSKKELEKMEEKVLESRRIRIYPTKEQQAYLTFNMFANIKMWNALLAEVYKPVSELDEVQALPKNKQSKEVYKRIERMSWEEQRDLFKGVRELSTKAIYDADETVFKSGWTLKDADTSMYSYTLRTLKTAMSNHLKNPRHFGIPRFKTTMDVDNNGSYTSGAQVCGISEDGNYLRVGKLKKFKLGLIEIANHYPSDGRLYKVTIKHESSDTWYASIVFEQAEHTVDRPRTGLAAGIDLNVTGNSHIVLQDGTRYQLPYDKIRKLEQKIEKENIKRSRKYEQWKKEVAIIEEDNKKALIPKHVPTLAERSNYQKNKKKIAKLHLRIKNLKKDYIKKTCSKLANEYDVIVMEDLAVSDMEKNKYRARAITRSNFREIRDTLTYMMDWADKKIVFIDRWSPTSKRCHTCGYIKHNLKLKDRNWTCPVCNSHHDQDINAAKNILDEGLDLLDKMNDTCKKCGHERTVITQDEKWTCTKCGAKNKTTPKEETSSDVA

SEQ ID NO: 3134 - protein, 440 aa, unidentified
  REGION 1..440: note = Table 20
MGTEKKVYEGRVFKIYPEKDSIEKIELNIEYARVTWNNLLYHCYQPIYAKYCDLSRKERAKAVRKYLSSIEYTEVKELRKRLNKIKRTDIDEKEWTRDCDSQIFPQTLRILKKAFDNYLKNPKHFKVPKFKSRKSIRYSGSYQTTNACRLVNECTFKLNKVSNKIPIYQHYPSDGRLYKVNIKKKPDETYWASLVYEQSEHTVRREKTGRSVGIDLNVSGGNYITLSDGHIYSVPFEEIKRIENKIERENRKLSKKYEQWRKEVAIIENDNKKALIPAHIPKLEERSNYQKNRLKKAKLQEHLNNIKKDSIRKICSQIANDYDIVAMEDLNVSGMIKNSKLARAVARSNFREIRDTLKYMLEWSGKKLIFVGRFYPSSKLCYECGYKNDNLTLKDREWDCPNCNAHLLRDLNAAKNIEREGLRILKEEITKEKGKSPGKI

SEQ ID NO: 3135 - protein, 367 aa, unidentified
  REGION 1..367: note = Table 20
MSFLNYTYRLYPTKKECIKINQIITLYKKICDRCFKYGILYFEKYKDYPSFKILYDLCNMKCSKEYDVIVKNSEIIKAAIYDVLKIYDSLKKGKTNDKHQEWQNREYFTFIAPYYEEILRFGKNRLIYSNVLVSKVKIHRNINGVINKMTIIKQGDKYYLIVLVRKNDIKPSEIIKKVIGLDVGVHHFLTMSNGNIIDKDLEYKKDELRLKRLRRVMSKKIKGGSNWKKIVNKIGKLERKIRKRREDFLHKISKKLIEKYDLICTENLKVEKFIRRGKSYGKIWSDISFYKLTKMFEYKAKLYGKKYIKVSQFFPSSQLCSNCGFRNYELKNLSIRNWKCPVCLKEHDRDINAAKNIANQGLKILKV

SEQ ID NO: 3136 - protein, 386 aa, unidentified
  REGION 1..386: note = Table 20
MIITYKYRFYPNEKQKIIINNTYFIIRKYWNKLLKEKIEHNIKYNSILMHDIKNIKIEEKALGKSEYDFSSILNSLFQLNELFSRNTRKNIPLKYKTEFDNQTFFINNNTDRISITNNLIVDKRLGILKVSYSREIPSDAAIKKITILKTKTNKYFLCISFFIKEKDKNKIDIDNAIGLDYSISHFYIDSNGRSRDLFCDNDFIIERIKIKKLFIELKNKISGSSNYNKIYQKILKYNIKIKNKRNDILHKESSELVKKYDIISVESLSAKEIANHNNIDIKTGYRYHFGKQVYDSSYQTFIKYLEYKCNLYGKVFIAIDKYFPSSKICNSCGYYNKLELELSKRIIICPKCGKRYNRDINAAKNIRDKGVKEYISTQIKSVSNKT

SEQ ID NO: 3137 - protein, 382 aa, unidentified
  REGION 1..382: note = Table 20
MILTYKYRYYPTKNQMIYINNTFTVIKKYWNRLLKEKTMIYKESGQIYIHLIKDVLIYDEYISNDKYDVYGVQNSIMQLNDLYVRNNKNNKPLKLKSDLDQKTYFINNYKNRISIKENNIFIKRLGNIQVKYSRPIPKNAIIKKATIIKTKTMKYYICISFETERIIQKENLNLNKAIGLDFSVSNLYVDSNGNKGKQTIQNERISKYYNKLDSLYDSLHRKKPGSSNYKKVYLKILKVYEHIKNKRNDYLHKESHKIVNKYDIIAIESLNLKQMASLPFVNKETGNKFKLGKRVYDASYARFLSFLEYKSKLYGKRLITVDEHFPSSQICFTCGYINKETKQFNKKTIICPQCGKIYDRDINAAKNIKKEGIRLIESKMRK

SEQ ID NO: 3138 - protein, 398 aa, unidentified
  REGION 1..398: note = Table 20
EKKIVTTATCLLLPTAEQKAMLEKWFGNCVELWNMVLADKLAFIEQNKCKPWMSAKELNQMPRITTYTNRPGYEHLKDTEFTVYMNLIYTLCERFEKYVATHKEEDIPKTKNPHGVRCVSITNDLDGYSKVKRIGENRLWICKIGEIDAKIYMPFPDLASIKKIRIKRSDTGKYFLDLLYETMPRRGAGTLDESKAVGLDYSPYRLFIDSEGYSPDFTGKNHKLDKRRRETQRVIARKEKGSGNLKEELLEIRKIEERIVNERRNVLNKEVHRLIENYDYIFLETLSMEEMAIGKRDGSKETPGKGRRCAVYAAAFDEFRRLLVHQAKKAGKVVYFIPSNAKTTYVCNVCGKEYDQKSLKIRSWTCPQCGTFLDRDVNAAVNIKNIGMRCYKRETQTN

SEQ ID NO: 3139 - protein, 378 aa, unidentified
  REGION 1..378: note = Table 20
MIAHKVLLYPNQEAEAFLQKQFEYARRDYNRQLEAIVRGIQSGKVDLFNLKKWMDAVCAQAKKAPDFYDGESYHYPDIIGWNKKRVQAAAEDYLANPLNKPKYLKHSRYRKIFRLTSAPLDAQRFSVSEDHHLLLGGMHRIKMAEPLRFQTHPIACEISLRNDRYYASFLFAENPKPYLLTGKTAGVTVGSADLVAVADSDGKKVRFALDAKKRTRIHKRIRHLEKVLSHKEIGSAQYEKTKAKLMRAKRKEEDVIRNFVEQTSHTLVKAYDRIGIDDASTQIRLIQHAYAKPYLQEPFSALSNRLQSKAKSRGKTVVKVKDRRSSAPICSQCGERNRKTKGLSNRRWTCPHCGAVHDSDLEGAERLCKEALKQERRI

SEQ ID NO: 3140 - protein, 383 aa, unidentified
  REGION 1..383: note = Table 20
MSQFQNTSCLFRVYPNQTQEQKLLYSFLVSKRIWNDLLLQENRRREEGSAPTPCDLLRLQSKRYVVKEDCKGGDPIAYGEVGANLYRAIRRHLLAPNQCRYPKPKVIHATTGSYARSNEDGAISYQDGKLYLPYLEHLKIRGLSPIPFGARIISVVIRKKASGKYVASITYSVRAKAPDPASFTPVGKTVGLDYSPARLFVASDPDLQITKEEVAANRADVRKIKKTDSKIRSCTHLSNNQKKLRLKEGILMEKIANRRKDLIEKYSTKISKEYDAVFIEDIDVKEMADRHSPYRFGRIIAQSAWGLFIKRLSQKCKQRQKRLIKVSRYYPSSQLCSSCGYRQQIPLEKRIYTCPKCGLQISRDFNAALNIQKEGLRLLKTAH

SEQ ID NO: 3141 - protein, 241 aa, unidentified
  REGION 1..241: note = Table 20
MPVVFHRELPWGSHVFKVELKEDCLGAEYYLLYSFYCDTPEAEAVIPPPENILGLDYAQDGLYVDSEGRSGDYPGFKAIGRARAVRYREAANRCVYGSRNWVKYQRRLKKYEQHMRNQREDWQYNRAKALADEYDAIACETLDFKEMQTKNPVLIPKMRDNCWGLFRKKLDEKLSGQGKTLVSIDRYSPTSQLCSRCGYRAGKLPLSERIFRCPNCGLEMDRDLNAAINIREEGANMLLAG

SEQ ID NO: 3142 - protein, 370 aa, unidentified
  REGION 1..370: note = Table 20
MNQLETVLYRTYVYRLYPTAEQQTMPADRFDFEDENYNAMARRINELYGQHAHKADAETVIRQYSISCPGIDYQGSLDHTRKELFQAVQKLWQGSYNKIYLRPVTRNQRCFYFKTMAVSEFHIIVPTIGTILRDTHRPLPVGAKALSGQIFYSSYEGRYYAHILIVYTAKLPAPITPVLYDRAIGLDYAQDGLYRDSNGHSAEYPGFAAKSKPKREALQQALSRAHTGSRRWRALRAKLAKLDRHTQNQRRDWQYKQSKRLLQNHDLIATENLDFVGMKRQTPRLTPKIEDNQYPAFLQKLQSKAIMQGKRVVRVDRYYPSSQICSACGAHLGKLPLTFSIFHCPQCGTQMQRDLNAAKNILHEGLRQAK

SEQ ID NO: 3143 - protein, 386 aa, unidentified
  REGION 1..386: note = Table 20
MQSSLYRAMTDKRGGFNMYGNQNITFLTQEYNLYPTKEQSLQLTGRFEQEDAAYNTLADAVNDAHRRGMEEAKLKQLVQERYLPASDEVDRYANKCVRARINALVPRLCRGKMSRIAPRRVDRSQRSANFRYAGVSDFHLVLPVIGSIAMEQHRDLPRGARIYGATVYADCYYAFYHVALHLIVPKKVIAPAPGHYGKVVGLDYAQDGLYVDSSGHCAGYPAFRHQAQDKLNRCHRAVNRFKTGSRRWRKFRQRAAKMERHVVNQRKDWQYKQAHALAQQYDAVCVETLDLAGMMQNEPALSGKLCDNAPAAFYKRLEQVLNAQGKRLIRVDRYYPSSQICSACGRRVGKFPMDSAFTCPYCGLRLDRNHNAARNIREEGLRLLEQ

SEQ ID NO: 3144 - protein, 369 aa, unidentified
  REGION 1..369: note = Table 20
MNTKFETVFRTYSYRLYPTKMQQLELKALFDLQDHAFNDWADLANRGVAQGKNYETIQKEIESHEILTERREDRYALSVTRSHVLTLARRLCDHQIERIRFRLPDRQQRSFTYKTVGISEHYLVIPSIGTIAMRGYRPFPDHAELRYAKILVDCYGAKYRVDLVLAVSLPIAEEQPVRYEKVVGLDYTQNGLYVTNTGENAGYPGYRRIVQEQLRRHHRAAERFHTGSHRWHKHKQRAAKLERHIVHQRRNWQYQQAHKLCKEHDAICVETLDFAGMKQMNPSLSPKLNDNACAAFFRKLEQILHRNGKKLIRVDAQFPSSQICSCCGAYLGKQPLGREYITCPHCGVIIRRDHNAARNIRDEGFRHLE

SEQ ID NO: 3145 - protein, 471 aa, unidentified
  REGION 1..471: note = Table 20
MYQTTATKTIHRALKFRAFPSPNLIPKLEAHFLATEEIFNYLLDLNTKYHEEHGQDIDSRTMASLAARQGKNYPITNRQAAYYVAPRLTYGLMRSKKEGEGGLKKKEVGGIKASFTINCSSPVFKILRGGAKKRASFYIPLIGEIVVANHRELPLDAKFKLCTVSRNPSGEYYVSLDYEAPISDNPGPGKIKRPIGLDFSVPKLYVASDRTLSPEADMLTVRKRYAKKISMLHKKLSHSKVGGKNYGKIRKRLAKVYQRIDNIRNDYIQKETRKIVDNYDFVGVETLSLTEMCERYKFYNAIHDDSWFRFLTTLRYKMQDARKTLRYVSRFYPSSKTCHRCGYIKHDLQLSDREYVCPICHNHDDRDYNAAKNIRDQALRDAGYRINYVYPANSQGAKQASGNQTAPTPAMANNNANRPAPPQKTLTQAVQNTPKAIGQDSNKLKDHKPNTVNANQEPPPKQPPIKRNNVL

SEQ ID NO: 3146 - protein, 380 aa, unidentified
  REGION 1..380: note = Table 20
MKKRKYYSTKNKRNKKRNRLFLTYKFRIYPTAEQQQKMNLWFFILRRNFRLLVDWLHYLYRKKKKDIYRTFDQFAKKYLLEHNPLCDLIPSEVIDWQVKEFRSQISKYIKPSSCISYRKYRSFVFPAIRYLDIHKRNSRFVDINFPMLGRIKTRFHRQLKCKTIVNVKFTKISKHWYIHILCSVKPSHKNNAVGSVGVDIGIKNLITTSDGKVFKPFVPDIRLLVKIKKLEKQLMRKSPGSSNYIKLKEKIMKLRCKIYNAEVDYYHKITASLVNKNKKILLEHLNIAEMGNRSSAIRQLIQRRRWHLLLHHIEYKSVRDNCQLVWVDPAYTTQLCSMCGAKVYKRLSDRIHICPFCGLEIDRDFNAAINIRQRGIFGNI

SEQ ID NO: 3147 - protein, 373 aa, unidentified
  REGION 1..373: note = Table 20
MIKKIWRSYKYRIYPTKSQKSLFLDYASNYLFVYDWTFNAYLSDPSIIKTDPTNAISALQNDKTFLTTTPLSILRASFVEATMGIERQKLTKETQSKHLRKRNGLNFRFVYRKRLNLSSENHVELPFLGSMKISYHRNIPESASISQLHFSKTADDKYFMNVLFSMDAIIQMAKKKTIKVLGLDYSTSTLYVSSNNERFEFPKKAILLNKRLKSQLEKLRTHETSSKNYARTSLNISKTKFKLRNLKKDWINKITTSISESFDVVVIENINLNEMIRKSKGLAKNIYQENWSDFKNILKYKLDERGKRLIVVSRWFKSSKMCSNCGFVKEDLQITDRIYICPSCGLKIDRDYNAAINLKHEGIRLLKQELRNH

SEQ ID NO: 3148 - protein, 304 aa, unidentified
  REGION 1..304: note = Table 20
MKKLLKLEAQIKKGKSNIKKKKLDNPIASFSFYPKDADLKMTKTQEAKAEISMVFFGTLLMYYHRPFPKNSRCLWVTLKRESNMFYYLEFLLDNAYKRIEPKSKESITMSDIIGLDFSMKKFFVSTDNNIIPDLKEITISRKEQKLIHVRHKNFERSEETSKNKERKRLLYVNLWRRIKASKIQYFYILAHDIFDKYEVVAVENLAFQEMKEKTNYAKIITKESYSTFVKILTEVARKEGKRVVVVPKWFPSSKICSYCGKKNEKLKIYDKEWYCPHCFRKVDRDKNAAENIRNKAYEMIKKEV

SEQ ID NO: 3149 - protein, 378 aa, unidentified
  REGION 1..378: note = Table 20
MKKGEQFDHYGVKVRLQLNEDQLIQVKKTFVCRRFLYNHLLDKRSKAWGRRNESLNLKKQKEFLKNMKQAFPWLKEVDKFALENAVFDLDRAYQNFFEKRANYPVFKSKHKKQSYKTNQTNNNIVLSADFKQVKLPKLGWVACAGSENVLQRAKKQNHRISSATISEKAGVITCSLLFEKAKTQAAHPKTGQVGIDMGLTYLFIDSNGHKEPNPRYYGKAQKRLAKLQRKLASQQKSSHRYGKTKRKIAKLHVLIANQRKDLHHKLAKRITDDNQVVCVENLHIRGMVKNKRLAKHIQDAAWYQFRRFLTYKAERKGGQVLLVDRWTATSRVCSHCGKKKTLLNLNERKWICAACRTEHDRDINAAANILREGLKQIG

SEQ ID NO: 3150 - protein, 411 aa, unidentified
  REGION 1..411: note = Table 20
MGKRLTVKQKNELLEAEDKQILNYGIRIHIMPNGEQATQIHKTFGCSRFVYNKYLADRQEYYKVNKKTLYVNDYKKNVLNPLKKTEKFSFLKEVDKFSLESAVENVEIAYKRFFNKQSKYPKLKTKKDTKKTYSTYFTNDNIKINLDSQTIQLPKLGEVNFSIPKGKNKGKFNNLGSHSVKITKATIGQVGSNYFVSLCIEETISKIKQINTKDIDLTKVCGVDLGLKHLAIVSNGIITIKYENHKYLTKSEKRLKNLQRRLSKMIKGSKNYEKMKLKINELYSYTANCRKDYAHKLSRKIVNENQVVVLEDLNIKGMIKNRKLAKAIADTGWYQLITFIKYKAEWEGKKFIQVDKFFASSKLCNVCGDKKIMLTLNERKWVCSSCHTVHDRDENASLNLRAEGIRLLEVA

SEQ ID NO: 3151 - protein, 410 aa, unidentified
  REGION 1..410: note = Table 20
MAGKRKTIKQRNEELAKENKKIRNYGLKFRAFSTPKQHEQIIQTIGCARFTFNFFLGERQEVYHETKETLRSGEFKQSFNALKDHPMFNWLKKVDKFALECALEQVDDAFDRFFKGQNRYPKFRSKHKSKQSYSTKETNGNIALDFEKEQIKLPKLGWVNVKLSKKQRRLFKEQGFNGKIKGATVTVHSSGQTHISLKIEEVVPIENDIDWSLVSAENIMGCDLGLTHFLIDSNGNKIENPRYLKQYLKKLATLQRQLKNKKKGSSNYKKLQHNVAKLHLKISNLRKDFLHKQSRKLVNENQVIVLEDLNVKGLIKNKKLARSIADVSWSTFVTFVSYKAIWDNKKVVLINRFFASSKQCNGCKEKHTLLSLSDRIWVCPSCGAEHDRDRNAANNIKEEGIRILRTPVAS

SEQ ID NO: 3152 - protein, 424 aa, unidentified
  REGION 1..424: note = Table 20
MIVTYRYRIYPNKQQKLQLSKTFGCTRFVWNYFLAWREERYKEQKLATTEAECRKHLNSVLKEQYPWLREVDKFALEDALIRLDNAYNRFFKGLSGKPHFKKKKSHRFSYTTYSTNNNIQIDFGVMAKDKTKNRCWGKIRLPKLGWIKARIHRTFNGKIKTATVTLLPSGHYYVSIAVEVDKVNNKNQTPEPINYAVALDLGLKSFHVDSNGNRVEAPKVLARYEKKLKKLQKDLSRKKVKSKNFEKARIKLAKLYQKISNIRNDFLEKLSLQVINENQVIICEDLRVKNLVKNRRLAKSIHDASWSKFLRMLKYKAERRSRIFIQVSPNFPSSQTCSDCGYKNEEVKDLSVRIWECPRCGSVHDRDFNAARNILAEGLKLLSEINKPVGLGRSEPEGDACGGKTSTIGGTSLVASLVCEAGSS

SEQ ID NO: 3153 - protein, 360 aa, unidentified
  REGION 1..360: note = Table 20
MEYTYSFRIYPTEEQKILIAKTFGCCRFVYNYFLDNFNKNGYNSKYTNNNICNRELKQEYSWLKEVDKFAISNAIYNLDNASKRYMNKLGGKPKFKKKNKGESYKTNYTNNNIEVLDNYIKLPKIGKVFAKVHRKPEGTIINATVKKYSDNKYKVMILVRKEIKKLETNSYIVGIDMGVHNFAYDSSNNVYNSPKKLINTYDKIGKLQKNLSLKKKDSNNYKKLENKINKLYDKCNNVRDDFLQKLSTNIINENQVIVVEDLNVKEMFQNKKIAKILGDISISKFINMLEYKARWYDRKLIRIGRYYPSSQLCSNCGYQNKEAKDLSIRSWECPKCNHLHNRDYNAANNILWHGIEMLLA

SEQ ID NO: 3154 - protein, 388 aa, unidentified
  REGION 1..388: note = Table 20
MLKTYKYRIYPNKEQQELIQKTFGCCRFVYNQALQHRKELYETKKESLNKISCNNYVNQVLKKKYDWLKEPDKYALTNAVYNMDNAYQNFFKKGKGFPKFKSKHNSKHTYKTNFSSNNIEVQDNQIKIPKVKWIKAKVHRKFNGNVKSVTIIQNSSGKYYASVLVDVGEEIKYEESNKAVGVDLGVKDLLITSDGEKFKNTRIIYKYEQKLAKEQRKLSHKIKGSKNWEKQRIKVAKVYEKIHNTRLDYLHKISHKLINENQVIVTEDLSTMNLVKNHSLSKAILDCGWYELTRQLSYKAQWYGRNYIKVGKYFASSQICSFCGFVNKEVKNLSIRAWKCPCCQSIHDRDVNAAINILNEGIKTIVHKTNTAGSVGIYACGVSRLRGQ

SEQ ID NO: 3155 - protein, 343 aa, unidentified
  REGION 1..343: note = Table 20
MPWNATRWNNHCNQVLKDQHTWLKEVDKFAITNALIHLAAAYKNCYVDHNSNPPSFKSKHSHYQSYTTNMTNYNIKVDHENRTIQLPKLGKVKAHLHRDFNGSIKSITISRTPDNRYFVSLLINVEPLPGKPEENNNIIAFDVGIKDYLVDSNGNKVSNPKHYKKNEKKLAQRQHDLSKKQKGSKNYEKQRIHVAEMHSRTANCRTDFLHKLSYGIVKENQFIISEDLSILSMSNGQKNSKGIYDASWGKFFRMLEYKARKFGKIYHQIEKYFPSSQICSVCGHKNVKVKDTSVREFDCDCCGQHHDRDVNASINILNKGLQELGITLKYATGTSGIGVCCSP

SEQ ID NO: 3156 - protein, 390 aa, unidentified
  REGION 1..390: note = Table 20
MEQYISYMYRIYPNDKQKELISKTFGCTRLVYNTILSLRTPLYNVCKMSFSFYEWQNFMVKCLKKKHDFLNEVDSVALVNSLIDQEQAFKNFIKNHNQYGYPKYKRKNETHLSYRTNLTNNNIKVDFQQNKVKLPKLGWLDAKLHREFTGKIKHATITKLSSDEYYVSICVLEDISFLPTVNKQVGLDLGIKTLCTTSDGVKYNYDFNFSLYENRIKNLQKYLSKKKQGSKRYRALQLKIAKIYQKITNKKKDTLHKIVSTLVHENQVICVEDLSVKRMMAKNKNKRKNKSKENVSSKNYLSKSISRMSWYTFTKFIEDKCKLTGRTFQKIGKFYPSSQICSCCGYQNKKIKSLSIREWICPECGTSHDRDVNAAKNVLNEGLSLLEKSA

SEQ ID NO: 3157 - protein, 393 aa, unidentified
  REGION 1..393: note = Table 20
MLKAIKFQLTLNQEKTILFLKHVGCCRKVYNHFLNENKEYYRQYQCFYPMYGFMKELPDLKNQFPYLREVDSQALQGVLFDQKQALQNFFKHGKGFPKFKSKHRDRMSFRVINTNDSIRFRGNQIKLSKIGFVNIARSSSQLKRLPTSSNYKIKYATISKDSDQHWYVSVLIECENQALLPRLNNIVGIDLGIKNNYQTCYRNDNCVLEYQTIDNPNAYEKEVKKLQKLQQRLSRKVKGSKNRDKARQRLAKKHFRVKSIRQDFNHQLSKFLINNFQMIVIEDLDLNQMKENRLGRKISDLAFYQFRTFLDYKSKWYGRDLVITDKYFASTKICGECGFKNMNLTLKDRDYTCPSCNTHLDRDENASKNLYQIGAHLWNTGEILDSNKYMNLF

SEQ ID NO: 3158 - protein, 392 aa, unidentified
  REGION 1..392: note = Table 20
MLKAYKYRIYPNKKQQELFEKTFGSCRFVWNKMLEEKLKAFQETKKVPRITPAKYKEEYPFLKEVDSLALANVQLQQEKAFKNYFKNKKHFKIPNFKKKKKYKQSYTTNNIKVDFEGGYLYLPKVKGGIKAIFHRQFEGKIKSATIVKTTTGKYYVSILVDIQNPKNKSKEPTNFVAGIDLGLKNFAVITNDTEIKKVEHPKYLSKALKKIKRFQRKLSRQKIGSKNREKTRKRLAREYEYVNNARNDFLHKLSKTIIDENQVVVVEDLNVKSLSQTHLAKHVLDSAWSRFVQYLTYKAEWYDRKLLVADRFFPSSKTCSSCGYIHKDLQLKDRSWVCPSCGTTHDRDENAAKNLRNYGIKYLVGLERPEFTPVEIASKRSMKQEATTSISE

SEQ ID NO: 3159 - protein, 378 aa, unidentified
  REGION 1..378: note = Table 20
MKIHRAYQFRLYPNKEQEMLIYKTFGCTRFVYNYCLDLKRKNKYLTKFDLIKELPKLKKEYPFLREVDSMSLQNTITDLMVGFDKHIKGQGGYPRFKKKGVKESFRTSYITSSYKKRVYENIKVDLKRRVIDLPKLKEVKIRGYRALNKLPGRILNATVKEVGTRFYVSVCLEEELELPERVNNQAIGIDIGVKNLVVTSNKEYYGNPKYLAKYERKIKHLQQELSRKIKGSKNYIKCKKKIAEVYRKLQNARKKMVEAIVSKITKHHDIIIAENLQVKKMLENKNNHKNLRKEISNATFSEIIRILKYKSLWLNKIFIQVSPYYPSSQICSRCGNRNEEMKDIRVRELKCSKCGLEIERDYNASINILKEGLKSYNN

SEQ ID NO: 3160 - protein, 353 aa, unidentified
  REGION 1..353: note = Table 20
MYKTYKVRIYPNSYQKSSIENIFISQRLIYNHYLSMLKSKKIDEKFKIEIDDTILNNYPILKKVDKDILLNTLAKLKTNIKNKNIDNILYKTKHQKNSYIVKDKVIIDNNKIIIPDIGCIRFKYKTNIKGKIIYIIIMRETNCNYYVSILSSFKEPKKVKPKNIVGIDIGIKNLLTLSDGNVVSKNKNTTKIQKRINLNQRKLSKKQRHSKNYYKQLKHLNKYYWKLEQCRKHYINNITTEIVNNYDIIVCESLNINNMLKGNITKKILNSSFDEIIKQLKYKCQSNGKYFYQTDNYFKSTQICSVCGAINEIYKNINYRLFICKNCGNTMDRDLNASINIMFEGLNKHFKLI

SEQ ID NO: 3161 - protein, 388 aa, unidentified
  REGION 1..388: note = Table 20
MEAIDIYKGFKFRLYPNNMQSKKINKNFGYNRFVYNYYLAKIIKEGYKSTSYYIKDYTTRLKYEYQFLWEADPMLIKKIIFKLEDNYKKYINGNSGYLKYKSKYNKNSYTINFIHSNKTIDYKNIKLDLENKLIKLPNLGNLEIRGYRNLKQIDGRIINYTISREKNGKYYIAVLYELSDTQKVTPETIVGLDLGIKKLITLSSGKTYENNRYITKYEEKIKREQKNLSRKQKGSKNYYKNIKKLNELYIKLSNNRRYYNHKITKEITENYDIISTESLTISKMIMDKEHHLSKAISDATFNEILEQLEYKAKERGKYFYKISPYYPSSQICSVCNNIDKKYKNLDERMYECNRCYSKLDRDFNASVNIMFEGLKLHIMAPMKNLSTR

SEQ ID NO: 3162 - protein, 380 aa, unidentified
  REGION 1..380: note = Table 20
MLIYKTYKFRMYPDLDQVQKLNSFLGTKRFIYNYYLNEKEKNKNLTFNQMKQDLVFLKDKHHWLKEVDDYILLNALDDLENAYKRFYNKLSGKPKHKSYNSIQSYRTSCKKDKKGITNIKVDLENNVIKLPKLDEIKIKGYRKLKEFNLKIINATVLKEAGKYYVLVLVLENLKTEPLKMPKSIVGVDLGVKDIITTSNGLKIQKIKELKKLENKLKGLNKWLSRSKLGRKNHYKIILKIEKINQKIKNIRKTYNHLITTNLIKENDIIVIENLKINPMIIDAKDKIAKYLYNTSLNEIIHNLRYKATWYNKRIYQVSTYYPSSQLCSNCKNKNSKVKDLSVREWECPRCHFVHDRDINASLNILDEGLKLYLKDLQKFN

SEQ ID NO: 3163 - protein, 388 aa, unidentified
  REGION 1..388: note = Table 20
MIIYKAYKFRIYPNSKQKQIINKSFGCSRFVYNYYLNKKKKNYKLNKNNLLLKDIKHDLVLLKKENTFLKEVDSMCLTNALEDLDIAYTNFFNNGGYPKFKKKGVKDSYKTDMIKRKYNNKEYYNIEVNIKEKLIKLPKLGYMKIRGYRNLKGFNKDIKNVTISKEADKYYASVCTCEGIKEHPFKLVNAIGIDLGVKDLVITSDGVKYKKLNTKRIEKHIEDMQRRLSRCEKSSIRRYKLKLKIKRLYMKLKNMRKYYIHKITKELTDENDMIITENLNVRNMISKEKRTSKYISKHITNSSLSEIIRVLNYKMNWKGKKILAVNTYFPSSQICNRCGNKNKKVKDLSIRKWECVKCGYIHDRDINSSLNILYKGIEIYFKEIYRQA

SEQ ID NO: 3164 - protein, 387 aa, unidentified
  REGION 1..387: note = Table 20
MFIYKTYKFRMYPTNEQVAKIMIFFKAKRFIYNNYINEMKKIEVARNKLEYLYSFEKFHEDLIKLKKEYPWLNDVDGCIIRTTLQDVNDAYEKYYHGEASYPKYKSYYQSQTYKTVCIYHNYRKNKSQSIEVNLAKKIIKLPKLNEVKISGYRKLINFEKLILSVTVKKIGKKYYAQVLVKENWKNEVSTKFSNNIVGIDLGVKNIVTTSDGVKYPGLNISRIQNQIKLLQKRLSSSQPGSKNHEKITLKIQRKYQVISNRRLDAINFITNDLVKKYDILVVENLSVKEMLQKSNSSLSDKMQNSSFYEIIKQLERKAYLYGKKVIKIDKFFPSSQLCSKCGYRNKELKNIDIRTWVCPKCNSHNDRDINASINIMKEGKKIMENNW

SEQ ID NO: 3165 - protein, 381 aa, unidentified
  REGION 1..381: note = Table 20
MIIYKAYKFRMDPTLEQKRLINQNLGSVRFIHNHFLEEKIKTYETYKRVVSPYLQMKSLRKLKDEYPWLKEVDHCSLMTTIFNLDDTFKSMIKEGKYPNYKSKYNKESYTTNNELKTWGNIKYYSVRLNLKDRIVILPRLKSVTIRGYKKLSSINGKIKSATVSKVANKFYVSLLVEMSIEVPENKCEKILGIDLGIKNYIVTSDGKKYKNEININEQRLKGLHRALSRSTKGSRNREKVIIKIQKFYRSLKNKRKTQICEIVKRILQENDVVVTEDLDVKKMYQTKSIAVKLRDVPFTNFIETMSYKAKWQGKKVIKIDRYFPSSQVCSDCGYQNKTLKDLSVREWICPKCYAHHDRDINASINIKNEGIKILLKQLNLY

SEQ ID NO: 3166 - protein, 363 aa, unidentified
  REGION 1..363: note = Table 20
MIKSYKIKIYPNKEQKELIFLTFKATRFIYNYFLNVRIEKYKKEKEVYDFYKCCKDLTVLKQKEEWLRKPDKCALQNALRDLDLSYSYFFKRGYKGFPHFRTYKKHNSYRSSFYNNNITLENKILKIPKVGKLKTKGFENIEGRILNCTISFKNNNFYASITCDDVIIEEKEKTNDFVRIDLGLKTYVVTSDYFEYKNNYFIKKYSDKINNLNSILSKKKEKSKQFYKIKNKLNSLYQKLVNSRNDYIHKITNKLVSKYDIICVETLKPSEMKKNKDLQKYIYDASWNNFIEKLEYKCNWYGKTLVKIDQYFPSSQLCSVCGYKNPEVKELKIREWRCPNCGINHDRDLNAAKNILNEGLKLL

SEQ ID NO: 3167 - protein, 368 aa, unidentified
  REGION 1..368: note = Table 20
MIQVIKSYKFRIYPNNEQKETIENTFTACRFVYNQVLQYYNEKYKKTRKNPTREQCINKAIKIKEKYTWLQTIDPIAIQSAAANVKTSHLIYYRTKKHPPHFKSKHNPRKSYTTRNTIEIIKVDKEKNIIYLPQLKWIKAKIDRKITGKILNATISNWGDNKYYVSITIKTTKTPLKKTQKAIGIDLGIKDLIITSTGQKIPNLALDTKYHKKLKKERKKLYKKQKHSKNWEKQRIKISKIHKHIHNKKIDYYHKITKKLVTDYDIIAVETLNIKKMIREPSFSKKIQEAAWAEIIRQLEYKCEWYGKQLIKINPYYPSSKLCSVCGYKYNNLQLNEREWTCPKCHTTHDRDINAAKNILNEALRRKQ

SEQ ID NO: 3168 - protein, 374 aa, unidentified
  REGION 1..374: note = Table 20
MSIEKVKYVYKSYSYRIYPNKKQTDMLENIFESCDILYNDLLELKINQYKNNKTYLSRNYCINHYNNILLKQKPELDIIPQTALINVIYTLDKTFKKNISKNKFPKFKRQYATKKTFKIFNINDLKIDFKHNKIYIKPFESIKTKLHRKFEGNIKHIIFKKEDDQYHVIFVVNAKHKILHHTKRGIGIDLGLKDLVITSNNERYYNLKVLYHYEKKLKRLNKELSKKEYNSKNYLKTKKKINKTHRKIKNIRKNNLNQISNKLIKEYDYIIAENIDINQLIKSHNISKSLIDASWNELLIQLEYKAKWNNKVFYKIDRYYPSSQLCSKCHKINPLLKDVNIRTWTCPNCGEKHDRDINAAKNILYRGLKDLHIY

SEQ ID NO: 3169 - protein, 262 aa, unidentified
  REGION 1..262: note = Table 20
MGGSPSISPVPFNADIIQADFSRDSTGCYYVSFLLKEEYRLIPRPQKTVGIDLGTRNIAITSDGLMIPSPNPMSRYEGKMRAEKKRISKMVPGSKNYRKSCRQLARVYRHCQNIREDTIHKATIRLIRNNGFIGKESLNLEEMEKTKKAFRRKLLDVNISSFMEKLLYKADWHNRVVVSVSPYFPSSQLCCNCNTVYPEAKIPVLPLGNVLSAIPTTNGMSTPPRISKKKPSVYTIITMGMFPRTLVTRVVEVLPLPLHRQV

SEQ ID NO: 3170 - protein, 302 aa, unidentified
  REGION 1..302: note = Table 20
CSLRCSIFNLEDSFDRFKKGLSEYPKFKSKNKTRPSYRTNNITSTYKGKTYNSISIDLINRKIKIPKLKEVTIRGYRNLKQINGRIINATVYKEAVKYYVSICVEEYIIIPKLIPTKIIGIDLGIKNLLITSDGYTIENKQIIEKYEKKLKGLNRWLSRSKVGSKNRYKIIRKLQTVYKKLKVLNAFQRKYLLHSISNKLVKENDIIVTEKLKINEMVQNKRLSKKIYDASWYELIRQLEYKSKWKNKKFYQIETYYPSSQICNRCGYQEKKIKDLSIRKWECPSCTNNNERDIMLFIQVSI

SEQ ID NO: 3171 - protein, 365 aa, unidentified
  REGION 1..365: note = Table 20
MKTRLLTNKCRIKPNKQQEDFLLSQLENCDFVYNNLYKQYQQDLKEDLENHIVATYKNEYFYKHLEKLIEENPKLKTTNKHVLVDVYHRLLQSINAKNNVLTDTTDKHILRSFKIPKYDFQIINSYFHHNNQRFKLRNFRKFDGKILHAIISYKRYEWHISIVYAINVKQLPKTGKAIGIDLGIDHFATLSDGRTIDMPDIEYYNDKIRNCYHKINQTIPGSQNNKRLKIQLQKNFTKKVNIKENFLHQLSMELVREYDIICVEMLEIQDILVNSNVPNKNILENDWQKFIRMLDYKSEFYMKDLVHIDRYFPSSKRCNVCGYMHQNMPLSVRTWECPSCHTKHNRDVNAAKNILNEGLRSINKH

SEQ ID NO: 3172 - protein, 367 aa, unidentified
  REGION 1..367: note = Table 20
MKKISKYYKCRIYPNKKQIELFETNFVAYAYVYNKSKLIYEKEYKENLKSGKKVVYSNKYFYDILKQLLKENNHLKQVDKIILIDAYHRLLDSINNYKTGLSQKPKFIKKTSTQSFRLQCTSKDKLKCKRLYLNDYGTFKLHDKREIQGKLKEVIIKKHNSQWFIILKCSDISITEYPKTNKKVGIDLGIKNLIIMSDGKSIKPPNISKIESKINKYNRKLSKQKENSKNYQKTVLMLHKLYIKRTNIIEDNLHKIAMEIVKDYDFIAMESLDIRNMIKNRRYSHSIYNMNWARLIKLIKINAELNNKTFIQIPQNYPSTKTCSNCKTINNNVTIDVREWECPKCNTYHDRDINAAKNILYKAIEMS

SEQ ID NO: 3173 - protein, 372 aa, unidentified
  REGION 1..372: note = Table 20
MITKILSYKCRIYPNKTQIQKFEKDLKACQTVYNKCKEKYEQDLKKQEYTKDKPQGKKYFYNILQQLIKQYPHLQETDQRILIDAYHNLIRAITLYKKGISNHPKKSNTKTLNSFKIRPNHNIYIENQKIHLDKYGTIKIHDKRKITGKILNYIIKKHYDEWYIIVTTRQQTQKYPKTGKAIGIDLGIKELAILSTGEKIHNINLEKEDEKLNKLYKQLNRKDKNSKNYEKILKKVHKANDKRTNKINDYLNKLSTRLVKEYDFIAMETLHILDMLNKSNNDKIRDASWRKLIEMTKYKSQTHGKTFIQVPPNYPSTKLCHNCGYKNNKLTLKDREWTCPKCKTFHDRDVNAAINILIKAQEINKQNKIKNI

SEQ ID NO: 3174 - protein, 358 aa, unidentified
  REGION 1..358: note = Table 20
MIRYTMSNKCRIYPKKDQTKKFEETLKITTQVYNNLKQQYIKDKKENPKQKYHKEYFYKNLQEQKKQYPQINNIDKTIPINTYHDILTEIRIKKEKINTEYKETSSFKIQKNKNIKIKDKTLTLAEYGKLKLHTGKNKFGKIKQIRIKKQNNKWYAIIISTYYTDNRIPKNKKCIGIDIGIKDLITLSNGKKIKAPDLTKIEEKIKKEYRKLSRKIYGSQNYQKQLEKLKNAEQKKKNIINDTYHKITTKLVEEYDIIIMEKLKINPMRKNHRYSKNIQKMNWYKLTQMIKYKCYKKGKIFIQVSSQFPSTKLCNNCNYLYKDITIEEREWTCPKCKQHHDRDINAAKNILKEGLKQI

SEQ ID NO: 3175 - protein, 363 aa, unidentified
  REGION 1..363: note = Table 20
MTYHPLTHKCRIYPHPIQIKKFEIALDACQFLYNNLLKQYKNDYKNNNVPKNIKEYLSDLCEQNQKTYKSISKLDASTIKDVSNSIIRAIKLTQNPGNLKEKTQNRKVKSFLINNNTNIQLKGNILHLDNYGKFKLYYGKTIRYCKVISYRVLYQNTKWYILITIRSDNIEIFPKTGKKVGLDLGINNILTLSNGKKYSPPEITKTNEKIDKLNTKLSSKKRGSRKHNEIIEKINILYNHRRNTINDHFHKITTQLVKEYDIIAMENLDIHNMLKDRRYSKGIFHSNWYKLLNMLKYKCELYGKIFIQVNRRFPSTKLCNNCGYKYEDITIDVRMWECPECGEIHDRDVNAAKNILQKALIDN

SEQ ID NO: 3176 - protein, 384 aa, unidentified
  REGION 1..384: note = Table 20
MEVKNLYKGVQCRIYPNKEQKQLIHMTFGHTRFIWNKMLDMLISRYKNNPDLSFPSKYRLRNLIKSMKYEYPWLKDVDSRALYSSVDDLYSAFQNLFKYSSKHPRFKSKHRNKQSYRTQYSNQNIRLNSNQRFIKLPKLGWIYCRKSIDFIENKNIKSATIKCLPSNKYEVTLIMESEKQALPTTNRSIGIDLGLKYFLITSEGKKINNQQFIKNNIQKFKREQRKLSKRALIAKQSGKSLHEAKNYQKQRIKVAKLSEKIKNQRKNFSHQLSKYIVRNYDVICIENLAVNFLIKNHKLSRAISDVSWFEFVRRLKYKAQWYNKQIIQVSRFYPSTKICSTCGAYNSKIKLGVDKWTCPKCKTLHDRDINAAKNILYKGIKNKV

SEQ ID NO: 3177 - protein, 406 aa, unidentified
  VARIANT 3: note = misc_feature - Xaa can be any naturally occurring amino acid
  REGION 1..406: note = Table 20
MLXDLDDAFQRFFNPDLQNGFPRFKSKKNTNQSYTSKFVNNNIRIVDEHHIKLPKLGLVYFKAGRILNGKIRAVTVRVNSRKQYQASILVESENQTFKKTKKSVGIDLGLKSLAITSDGQKEDILKVDDRLNKQLRIWERKKSRRYENAKKAMAFDEHDKVLFPRTDLKQFPRYQQALRTSENQTFKKTKKSVGIDLGLKSLTITSDGQKEDILKVDDRLNKQLRIWERKKSRRYENAKKAMAFDEHDKVLFPRTDLKQFPRYQQAVRTVAKLKKHIAERRRDNLHKLTTRLVKDYDTIVVENLSVKNMMKNHHLSASIANASWGTLISQLKYKCAWYGKRLIIIDPKNTSRICHECKQKNHEFDSLSQSEWLAAREWDCPNCHAHLDRDVNAAKNILAKGLETLS

SEQ ID NO: 3178 - protein, 394 aa, unidentified
  REGION 1..394: note = Table 20
MATALKGFKLKLYPTSDQQILFRCTFGCTRFVWNKMFAMQIARRKNNPKQWLVSRFGMDSLLPLLKKEYPWLKDIDATALQMATDQLADAYTRFFKGQNGFPHFRKRTYAQSYTSKCINNNIQVVDDHHLKLPKAGLVYFKAGRLPAGKIKRVTIRQKSAGHYEATVLCECEIADLPKTGKSVGGDLGLKALLILSDGQKEPNLRYDKQLAKKKHQWEKKKARRLLGAQAEIARDKHEHPNNVRTLEDFKNYQEARTMVAKYAAKEAYQRQDQLQKYTTWLVQNYDLIVLEELNVKGLLKNHKLARAISNASWGRLVAILAYKCRWYGKELILVPPAYTSQECSSCHERNQRLGLSQSQWLGVREWDCPSCGTHHDRDINAAINILNKGIKTAA

SEQ ID NO: 3179 - protein, 400 aa, unidentified
  REGION 1..400: note = Table 20
MQKLKAFKLRLYPNASQREQIDITINHSRYVWNEMLEMQKARYKNNKNAKFINTFGMNSLLTVLKQELKWLNEADSTALQETNQQLNDAYKRFFKKLGGHPHFKSRKFGRKSYTTKMGMSLIDDKHLKLAKLGAVYFKAKAIPNGKIKRVTVRISPTGKYYAMVLAETEIKPYDTTGKSVGVDLGLADLAIQSDEYKLPNIRFDKQLAKKKLYWEVRLARRRNRAIQVIHNTKKLTGQELTLDDFSNYARAKHMIAKYSEKIANQRLDYLHKYTTQLVKNYDVIAIEKLQASKMMKNHKLARAIANASWYKLSEMLAYKTEWYCKTLIKIDPSYTTQVDYETQEVIKHDLSVRKYTNSFGHLIDRDINAAKNILEWASDPEKHAVILEQISRNKTRVTKA

SEQ ID NO: 3180 - protein, 389 aa, unidentified
  REGION 1..389: note = Table 20
MLKGMKLKAYPNCEQRQTLFCMFDNQRFVWNQMLNMLNERYENNKKSIFPSSYELDLCVTQLKREYSFLSISDSTALQVVDKQLIDAFKRFFKRIGGHPNFHSRKASKKSFTGKSKIQVVGTHYVKIPKLGYLKVSNTAGIQNHKIKRYTVSFNSTGKFFLSVNYEDENQVFDKTENSVGIDLNTGELAVFSDETRIPSLNLKPLERKLRVEQRKLSRRYLRAKVEIDFDKTFKSKDKQRDLLDFPNYQRQKRVVARIHEKIRNKRRDYIQKITTDIVKNYDAIVIEDLKVSNMLKNHHLAHKIEHQSWYEFRRELEYKCEWYGKQLIIVSPNNTSRICSSCGQKNHEFDNLPQSEWLKTREWTCPTCHQHHDRDVNAAMNILNKGLTA

SEQ ID NO: 3181 - protein, 563 aa, unidentified
  REGION 1..563: note = Table 20
  VARIANT 265: note = misc_feature - Xaa can be any naturally occurring amino acid
MSKVIKGIKLRLYPNQSQREQLWQMFGNDRFVWNQMLGMAKERYQNNPNSLFVNEYGMNYLLKQLKCEYAFLRESDSTSFLVVNHNLAQAFKMLFRHRGGYPHFKNRHSLRQSYTGRSTCKVLARRRMQLPKLGSIRTSRTGLVGDAKIKRYTVSYEPTGRYYLSLQVETEVNQLPETRQSVGLDMGLADLVISSDGVKYGTFNAEWLEKQAVRWQRKYARRRYLAQCQVWKWNHNRFDHLEELDDYSNWQRARVNKARCQKRIXRHRGGYPHFKNRHSLRQSYTGRSTCKVLARRRMQLPKLGSIRTSKTGLVGDAKIKRYTVSYEPTGRYYLSLQVETEVNQLPEMHQSVGLDMGLADLVISSDGVKYGSFNAEWLKKQAVRWQRKYARRRYLAQCQVWKWNHNRFDHLEELDDYSNWQRARVNKARCQKRIANKLRDYLHKLTTDLVRNYDVIVIEDLKTKNLQKNHHLARSIANASWYQFRAMLEYKCAWYGRQLVVVKPDYTSQICSNCGFSSGKKPLEVREWTCPKCGIHHDRDVNAAVNILHKGLKAIGQGLALVK

SEQ ID NO: 3182 - protein, 498 aa, unidentified
  VARIANT 379: note = misc_feature - Xaa can be any naturally occurring amino acid
  REGION 1..498: note = Table 20
MLKGIKLRLYPNRTQQNQLEQMFGNDRFVWNQMLAMMNERYQNNKALPFLGKFKLNYLLKPLKKEYPFLKNSDSSSLQVVNEFLTQSWKNFFQDKTGQIGKPRFHSRKYLKKSYTGKSIIKTAGKRYLKIPKLGYVKTSKTGVLQNTKIKRYTVLLEPTGKYYLSLQVEISEPEKYSLTGKQVGIDVGVADLAILSNGLKYPSFNSSYFEKKAKIWQKKYSRRRHLAKLLVLQDRNKRVLCPRSLESFTNWQKAQKSKAKYQAKAANQRRDYLHKLTTHLVKQNDVIAIEDLKTKNLQKNHHLAKSIANASWRMFRQMLEYKCKWYGKKLIAVDPKNTSRICSKCGYNSGAKPLEIREWTCSKCQTKHDRDINAAVNIXLTTHLVKQYDVIAIEDLKTKNLQKNHNLAKSIANASWRMFRQMLEYKCEWYGKKLIAVDPKNTSRICSKCGYNSGAKPLEIREWTCSKCQTKHDRDINAAVNILHKATPTGQGLAMVTS

SEQ ID NO: 3183 - protein, 234 aa, unidentified
  REGION 1..234: note = Table 20
KYYLSLQVEISEPEKYSLTGKRVGIDVGVADLAILSNGLKYPSFNSSYFEKKAKVWQRKYARRRHLAKLLVLQDRNKKVLCPRSLESFANWQKAQKSKAKCQAKAANQRRDYLHKLTTHLVKQYDVIAIEDLKTKNLQKNHHLAKSIANASWRMFRQMLEYKCKWYGKKLIAVDPKNTSRICSKCGYNSGAKPLEIREWTCSKCQTKHDRDINAAVNILHKATPTGQGLAMVTS

SEQ ID NO: 3184 - protein, 448 aa, unidentified
  REGION 1..448: note = Table 20
MLFQAKEMKFMAFKTKLAEHEIQLGTRQYRIYPEGEQIAWIWQLFGANRFVWNQFVAAFEARYEANPELKFPKIGVLKSWLPLMRKEYEWLKRVNSTSLQFTVERFSDDMWAFLTKKQVKQGKPRFKSRKYYCQTATIKNVKYQTKTGAQAQIAVLSPHHLRIGKKNGITLRTSSLHNLRNVRIQKAVISYRQDLDRYYISFSVVKDKRQLAQYQVKSKKTGKAVGIDVGLGKEWLVTSDGKRFGVPDTFKLEKAMLKRQSHCDRNRTAIEKRAARFNHEHEEKIDKYDYANWQKLRKTKSKYQLKIRNIRYDYLQKVTTELVKGYDVIAIEDLKVKNLLGNHKLAHNIANASWGMFRRLLAYKCEWYGKKLIVVKPQYTSRICSECGKKNPRFAHMKTRDWLAIREWYCPYCHAHHDRDVNASKNILARAVGLGSKISKIQAGAQPC

SEQ ID NO: 3185 - protein, 422 aa, unidentified
  REGION 1..422: note = Table 20
MAEEQLYKALKTRIYPNPKQRRFIHQNFIVNKYIWNYFLDYLQNNYQECKKYLDENKENMSDDELKEIKKKMYPSKFDLINKLSELKKKETWLKNSESTSLQNTIGNLYQGYQNMFRGDARLPRFKRNLHSYTSNITSPLKTNSIDREKHLLKIPRLGKVFYPYSEKLKMNSIQTITVSEDNLHNFYVSIMYKNGFSTSNLDNLNASKMIGIDLGLTNFATLSNGDTIPAMQFDYTSRKDIIRKRKLARRGKAAFKKVKAFNHKHAKDDTPLMKVDDLKGYRDIKKADAKVEKKKALRRKNFLQNIANSLVKQYDFIVIEDLKINKMLKNKFLSRRIANASWRSFRTMLENKCKEKGKILMVVSAYNTTRICSQCGYYNGIKNLSVDKWTCPHCKSHLIRQVNSAKNILNKGIEEWKVKKDK

SEQ ID NO: 3186 - protein, 419 aa, unidentified
  REGION 1..419: note = Table 20
MLIIKGIKAKLYPNQNQRTWLNQQFGDIRFVWNYFLDIEIRKWNRAKLYKIAKKAIPEPLKFPRKYDLYNQLKSLKKKYKWLTYADSRSLQCELGILYQAYQNLFQHRAKAPKFKSKNYFKQSYRTTSIPKQIDKYHVLKLAKLGYVKVRFNEPLVGAIKQVTVTRDSTGDYFASLTVEYESQVQLPKTNRAIGIDVGLDDLAILSNGMKWNSKYYSKASEAIKHKWQILSARRRRDAIKDIRYNQHLQKEMPNHHVKTLAEYHNYQKAKHEVAKINRHIKNQRVNYLQFLTTWIVRHYDFIAIEDLKVSNMQHNHKLARAVACASWYRFRTLLTYKCAWCGKYLELVDPKNTSRICHTCGKNTGVKPLNIRSFICPYCYTKQDRDVNASINILRLGLEQAKANNSTSVQDASLQSCIE

SEQ ID NO: 3187 - protein, 400 aa, unidentified
  REGION 1..400: note = Table 20
MTYTAIKIKLYPTEKQKELIDINFSCCRKVWNTLLAELTERNDNGRLVLKDEYDFKRGGKLPSRFDLQKKIPPMKKEFPYLKKADSTALQSGVTNLRRAFDNWKNPNTKSSFPRFKRWQVNDNTYTTSAVYKKGIGSIRILSRNYIMIPKLKAVNFRCDVPINDHIVNLTVNLTNTNEYFASVIVDRDITKFDKTQQSIGIDLGVADMAILSNGKKYKTVDYGNQYNKRLRIWERKLARRRAEMKKEIAFNKKNDIEGGRLWFSEFPNYQKARIQVAKYKKKAMLQRQYRLQWISTETVKQYDVIVIEDLSTKNMLENHRLAKAISKQGWRVFRDMLQYKCDQYGKQLVVINPYKTSQICPNCGYDDGKHSLNIREWICPSCGITHDRDVAGAQMILKKD

SEQ ID NO: 3188 - protein, 377 aa, unidentified
  REGION 1..377: note = Table 20
MLKGIKIKIYPNQEQIQFLEQNIGNARFVWNQMLNMWNTRYQNNPNLPALGKYDLSSLLPTMKKEYEFLKKSESTSLQFVCETLHGSFVEFFKKARRHPRFKSKKKATPSFTVKNNKNIELKKNAIKLPKIGWMKARWSDNVSFDKIKQVTITRTPSGYYKASVLVESESQVLDKIGKQIGLDMGQSDLMIGSDGTRVETRTYKKYERKLKQWQRKASRRLRLAKEKGTPLEEAKNYQKSKRMVAKYHEKIRNCRQDYLHKATKKIVIEYDFIAVEDLRIKGMLNKKNSKLNNHAIANQSWYELRTMFEYKSDWYGKTFVKVDPKYTSQDCSNCQKRTGPKNDLSVRQWVCPNCKTKHDRDINAGRNILNKALIQVG

SEQ ID NO: 3189 - protein, 427 aa, unidentified
  REGION 1..427: note = Table 20
MAKKKTTKSMTSYRFRLYPTAEQAELIERTLDATCWFYNQLLTIQKQRYIEDPDVRVSRNDFTNLVSPYRQANPKLKKIDSTALDVVCENLVRAYDNFFGKRSKFPKFHKRKFTNSYTAAGRIKDGKSSIHFSQTGNRFQIRLPKLKFVTIKGSRLPSNPVKQATITHESTGHYYVSVQVERTKENQNVSLHPVSKRTDNAEIKLTGKSVGIDINIPHLDFSDDHAIVKLETLEKTSEAKHLLLWERRLAHRRALAKEKQAQLEHASRQKMGIDSDWHWWQSKRYQEAKQHVARLRATQAHRRDLFFQRLTTQLIQEYDVIVVEDLTVTKMLKAHRYAKHISEISPNRFITMLEYKAQWHAGKQVIRVDPKNTTQACHNCGFIMGTDGTRALTISDREWTCPKCHVHHNRDKNAAKNILQRGLATLN

SEQ ID NO: 3190 - protein, 372 aa, unidentified
  REGION 1..372: note = Table 20
MEQYKGYKFRIYPTDQQKQILAQSFGCSRKVFNLTLDQRKTKKAQNLQSLIEEYPYLKEVDITSLEYAQANLYRAIKSKNINEIKFKSKSYSKQSFRIKNRESIKLLNKYQIDISLFDKPLKAKVHINPKGLILSLTFSKKASGNYFLSLLVKENIEPMKKTNKVVGIDLGLENFAILSTGQKIGNRRFNRQMDTKINKELRKLSKRREKAIKDNKPLYQASNYQKQKRKVARLYEKSFNQRKYFLDKLSTLIIKNHDVICIEQLEIKEMISNRQLSRSIADVAWTLFVEKLNYKAKWYGRRIVYVDRWFPSSQICSSCGIRHEKMPLSIREWQCTSCHKIHDRDINASRNILFQGLKQANIKTVDRAGLAW

SEQ ID NO: 3191 - protein, 383 aa, unidentified
  REGION 1..383: note = Table 20
MSKQIHKAYKFRVYPNEVQKVFFAKSFGCARFIWNKMLADKKEHYQLDKKSLKNTPAQYKKEFEWLREVDSLALANVQMQLHQAFQHFFKQPNVGFPTFKHKGKKDSYTTNNQKGTVAIDGSFIKLPKIGPIKANIHRSIHGLIKSATVSKSPTGKYYVSVLVETIAAPFPKTQSNIGIDLGLTDFIVLSDGTKVANPKFLSKLQNKLARAQKIMSKRALVAKKDNRKLRDSKNYQKQKLKVAKIHEKISNTRKDFLHKQSFNIVKNHDIIVIEDLNVSGMLKNHKLAKAISDSSWSAFTTMLSYKGDWYGKQLIKVDRWFPSSKTCSGCGHILGKNELKLSDRSWNCSSCKSENDRDLNASVNILNEGLRCLKLKEPLVQGS

SEQ ID NO: 3192 - protein, 445 aa, unidentified
  REGION 1..445: note = Table 20
  REGION 305..306: note = misc_feature - Xaa can be any naturally occurring amino acid
MAKKLSVQEIIFTLQKYWASQGCMLMQSYDTEKGAGTMSPYTFLRAIGPEPWNVAYVEPSRRPADGRYGENPNRLYQHHQFQVLMKPSPENIQELYLGSLRELGIEPLEHDIRFVEDNWENPSMGCAGVGWEVWLDGMEVTQFTYFQVVGELQMDPVASEITYGLERLAEYIQNVNSVFDLEWADGVLYGDIFQEPEYEHSKYSFEESNQDMLLQFFKDYEQEAKRLIDLGLVHPAYDYVLKCSHTFNLLDARGAVSVTERAGYLHRIRIMAKSVAKAFVEERRKLGFPLIHDEQERQAVVAKYXXLKEAFDDLKADKMNQRHNFLQQISTALIKNHDLVVAEELRSKNLLKNRALALSISDVGWRTFLGMLAYKAKLYGRQFITINPRNTTQTCCDCGFVMGTNGTDKLTLDDRNWTCPNCGIHHIRDWNAAKNILDKGIAKLA

SEQ ID NO: 3193 - protein, 414 aa, unidentified
  REGION 1..414: note = Table 20
MKTMKELKYHSAIKVKIYPDDTQKRMIAKNDGAKRAVYNFLVASGNEIYRLSKTAPYVYVDRKRVEWLKANRKKRANIFNTHPFLYDKEIDSLAIDNAIDNYNKAWNNQKQLHTGVPVFKCKGYEQAYQTNPHYKKGSCNVRFESKHFVTLPKLGVVRFDGSPKMVKYLLKHSADIKLGTITVSRDAVGEYWAAFQLASDTPFKAPFPKTGKQTGIDLNLIELVNDSDGNAVENMHFYKKAQDKLAKAQRKLSRRKEAAKRDGRKFYESKGYQKQRHKVAYLSRKVARQREDYLDVTSKQLVENQDLIAAEDLRVSNLMKNHKLAKAIQDAGWRTLLTKLQYKAVLYGKEVILVPPQFTTQTCSCCGYVMKGEEKLTLADREWTCPQCGTFHKRDVNAARNILNRALEQKKRTA

SEQ ID NO: 3194 - protein, 490 aa, unidentified
  REGION 1..490: note = Table 20
MRTCKDMTYHAGIVLRIYPSNEQKRIIAANDGAGRFIYNRLVALDRERYRLSKYADLIPAYRDRMDYIDSVIRNPDKGIAQCLKNVVPFCYEKDIDSLAIDNSIKNYRAAWSKYKEDPIHNGIPAFHKKGYSETYQTNAHYDADAVCINDSNVRFPDKKHIILPKIGEIRIAGSKKRIAELIDRPDTRIGTITVCKDVIGRYFVSLQLASDKPFAKNLPMTLSSAGIDLNIENFLWDSNNNVVENPKVRRKIQKQLAEIQQSISRKAVRAKKEGRLLSECKNYQKERLRAAHLQIKIRGKGDDFRHVVSKRYVESQDIIAAEDLKVKNLLKNHKLALAISECGWSDFLRKLEYKCAMYGKRFIKVPPQYTTQTCSSCGYVMRGGNTLQLNDREWICPECGTYHVRDYNAAKNILAKGLAILCDEAPVCSTGNAKICPGDDNSPGKALITEPLLQGHICGKSGVSAKVESVETRYLSFSAITKPAALAAGS

SEQ ID NO: 3195 - protein, 421 aa, unidentified
  REGION 1..421: note = Table 20
MRQMNQMPYIIGVVIRIYPSNRQKRIFAKNDGAARFIYNRLVARDRELHALERVKRYCEPVAARISYLKSLGTNPSDLKAAYPFLEDKEIDSLAVCNAKQNYQAAWNNFMKVPGTSIPTFHKKGYSKSYQTNCQYPSGCTDIKKGSVRMLDRKHVQIPKLGSVKFKDSGMLQHIFARTSETRIGSVKVAMDSCGDYWISMQIGSVCPFHNAMPAVGHGVGIDVNVKNLYTDSDGNEAENPKFYTKTEKKLAKAQRKLSRRMERAKKDGRSLCDAKNYQKQRLKTAKISRSVSRRRKDYLNVQSKRLVESQDFIFTENLSSKAMMKDNDYAKYIADVAWNKFITMIKYKCGFYGRIFGRVPAKNTTQMCHVCGFILTGDSRLSFNDRSWTCPDCGTFHMRDHNSAINIKNSGTRLYLPDSAL

SEQ ID NO: 3196 - protein, 415 aa, unidentified
  REGION 1..415: note = Table 20
MKKMKEYKYHIGLNLRIYPSDKQKKIIKMNGGASRYIYNKLVADNNEMYELKKTTSFSFADKDRLEFLQSVHSSKSNMLVMIPFLTQKEIDSDMIDNAIQNYKMAWNQFRKVKGTSVPTFHKRDNTYSYKTSNHYKKVRDNGLKDGSIYFIDNNHINLPKIGKIRFKGSKKLLNKILNFDNEIRLGSVSIEMDNLGLCYISISLASDCPFHNEYVKTNSSLGIDLNLSNFLVDSYGNITDSPEFLKKSEEKLKKEQRKLSRKYEASKKGEYKYYECKNYNEQRLKVAKLYKHVSNQRKDFHCVLANNLVKNHDYIFAENLKVINLIKNHKLAKAISDSSWRSFLTILEWTAIKRNKTFILVDPKNTTQMCSTCGTISDKKIVLGQEEWTCPHCGTYHIRDINAAINIKNKGLSLA

SEQ ID NO: 3197 - protein, 421 aa, unidentified
  REGION 1..421: note = Table 20
MLKLMSEYKYYSGIRLRIYPSHQQKRIIKKNAETARFIYNEMIACSKEIAAFGKLSIYIQGITERIQVLRERIKSVTSLKSHFLWMDDVDLDANMIANAKKNYAHAWKCYRCSETKNPPAFHRRTYALSYQTNPHYNRQRVSEATLTNGSAGFRDTSHVYVPKLGRIRCKGSRKILAHIFSMHSVRIGTMTVSRDACGGYFLSMQLASDEPFVTSLPKTGSAIGIDLNLKNFYMDSNGRCVNHPVYIQRTKRRVTRAQRILSRKARGCRRQHIPLRRGVRYQAQRRLVARLKQKIKRQRQDFLHVQAMDLIKNHETIVAEQLDISRLIQLRRCTKAIYEAGWGTFLDFLEYKAKRYRRIFVKVNPAYTTQRCSACGYILPTGQRLQLSDRQWQCPSCHVIHDRDRNAACNILQRGLATLSK

SEQ ID NO: 3198 - protein, 453 aa, unidentified
  REGION 1..453: note = Table 20
MKSMSQLQYHFGAKYRWYPSDTQKQVVKVNADVRRAFYNHLIANKRKLGWIIHTSYWNGDLKRKIIANYKHTLHESVVRKRISWLRDKYIDSLNFAKTNQSNNLAYKNHASGLQGQPQFHRKKDHPYEWKYQTSRITWKSKGKRKSNIYFTDNRHLVLPVLGRITLGTTRKMPDDTLIGTVTIYKDATDKFWVSLQLASDTPFKSYQPQTHSAIGIDLNICNSLMDNYGHQVSNPKFYTHGLPYLKFLQQRENRRRRYAKSHHINLTVDKGYQRARKRCAKYYGYIKNERRAFLDRISTRLIENHDLIVAENLKSSNILRNHKIAQKASDCGWREFLSMLQYKAKLYGKTVILVNPAYTTQKCSHCGFVCTKHNGYAKKHGKHLDLDDRYWWCPICHTYHIRDRNAAVNILRRGQKEILVKQRQNLIRLKRKRTPQELDSRPNLTFEFHRAAE

SEQ ID NO: 3199 - protein, 413 aa, unidentified
  REGION 1..413: note = Table 20
MSDFGQLPYRFGIKVRIYPSDRQKQLIKRNAEAYRFVYNEHHAIQQRLEHLHQIKHPPTKVHTLIQHLTKSLDYQRMALNHSFLADPRIDAHVRLQAIIDYHDRQMAYQLGRAKRPHFLRKSYTWRYQLACQYHHRRHGSLRNGSIAFTDTHHVTLPIIGRLRVAGSQRRLLSREALIQITLVTLTKDAVDHYYLSLQLTSLVPFVRHLDDQPRPIGIDLNTANFLTTSTGKTVASPHFNRRLSFRFRRAVQRLNWQRHLAQKERRPLRTARNYQKQRQCVAKLLIKLHQQRENFLQQLSTQILRHHDLVVAEELRGQDPARNYAMSWRFRDPGWISLLTMLRYKAQLYGRTFITVNPVSTTQTCSHCGYVLHGQQKLTCRERTWWCPHCLTFHRRDQNAAQNILNRGLIRLA

SEQ ID NO: 3200 - protein, 415 aa, unidentified
  REGION 1..415: note = Table 20
MKSMTEMKYHYGLKMRCYPGDQQKQLIKINSDASRFIYNEMVAINKELMQLRRVKLPIDIVQDRIKQLTMRQNAKQMSNHYQFLEDKRIDSLAKANAIQNYRKAWNAFRKVHATGIPKFHRKSYRWRYQTNCQYGQKTALLTNGTVCFLDNNHVKVPKLGLLRVAGSQARLLKRICETRIGTVTLTKDSADRFFLSMQLASDESFVKVSKTTHGHVGIDLNTDNFLTDSEGNIVPNPRYYRTIKGKLAKEQRILSRRQQRAKKEHRSLRDSKNYQKQRLLVAKLHAKVMNQRHNFLQQISTALIKNHDLVVAEELRSKNMLKNHALALSISDVGWRTFLDMLAYKATLYGRQFITISPRNTTQTCHDCGFVMGTNGTDKLTLNDRDWTCPNCGIHHIRDWNAAKNILDKGIAKLA

SEQ ID NO: 3201 - protein, 473 aa, unidentified
  REGION 1..473: note = Table 20
MSKERPTMSELPYHFGIKMRCYPSTKQMQMIQKGIDASRFTYNEMVARNQDAYDCVRLSEASLDPWFFFRTKERFWEFWRHRGQLNDVNHRGEWKDMPLYATTLTRLVKLPLMKEYYKNCIKTQRVVKMRCTWLQDKLIHSSTLSMAMKSYSAAWNLWRKANKGKIGTPRFKRKDWFGAGAMQLSNSYASNQPIDMYSGSVKVLDNKHVQLPKLGQIRVSHLAHFMNSHDGNVIRIGTVTVSKDNLGQHWVSFQLGSMMPFVKEMKKNDSKIGIDLNTDNFLTDSNGERVENPRYYRNAEKYLKHAKRVMSRRQLRAMKEKRSLRGSKNYIKQRLLVAKRMKHIANQRNNFLDNLSVTLIKNHDLVVAENLSSKNMLKNHALAKSIADVGWRTFIQKLTYKSELYGKTFLTVDPKNTTQTCHDCGYLMGSDEKSNRLTLANREWTCPGCGTYHVRDHNAALNILAKGQLAIAK

SEQ ID NO: 3202 - protein, 434 aa, unidentified
  REGION 1..434: note = Table 20
MAELKYHYGWKFRIYPSNKQIQYFINNSIVSRVTYNKLNELNNELYHLKKELEKEDADKETIQAKIDHLKYVTSTSSRLTKEFSWMRELEGVHSSTAGNAYRSYQNAWKQYKKVHNAGIPKFKKRTAGEKFQLTNGYSTGKECNLFTGKIRFESDLKHIIMVPNTFKDKKTKISYGRIRSDGVKGTPLEGKTDIRIGTVTISKNATGQWFLAMQLASDTPFREVKAKTNKQIGIDLNRDNFCMISDGTEIANPRFIKKGEIRLKQEQKKLSRRAVRAKKEGRRLSDSKNYQKQRQKVAKIHQHIANQRDSFVHKLTLDLIENNDLIVFEELRSKNMMKNHALAQSIADGAWRKTIQVATYKADLYGKQVVTVDPKNTTQKCHKCGHVMGTDGTNKLTLRQREWTCPKCGTFHIRDLNASKNILEKGIAKISSEK

SEQ ID NO: 3203 - protein, 432 aa, unidentified
  REGION 1..432: note = Table 20
MKPKSDEEEKKPLFAKLKYHFGIKLVAFPSSDQKTTIKQNSDAARFIYNEFVALGLEGWKLRRLEKSLIQNQVSSSNPEWFTLALKAVAARLKIIGDQLYNPTQLKQRFKWLDKNKRIDSTMLYATLNFYRASWNMFHKVHSAGIPKFHKKSDSQRYSTLKTTNNIRIADQNHLKIPKVGQIRVTKIPDWLLNRTDIEISGASVKMDAVGRYSISLTLGSDHPFKEELPKTNSKVGIDVNVENLYIDSFGDVVENPRFYQKQKKQLQKEQRKLGKRAARAKKEHRSLRTAKNYQKQRKVVAALHHRIYNQRHNFLHHVSTALIKNHDLVVAEKLQGKKPVKKNHALSQRIQDVGWGILFEDLAYKAKLYGKEFTKVDPKMTTQTCHTCGFVMGRGGTRKLTLADRIWTCPKCQTKHVRNHNAAINILSKATV

SEQ ID NO: 3204 - protein, 339 aa, unidentified
  REGION 1..339: note = Table 20
AKWLNTDSRLDTNMPSMAIRNYQASWNMWRKVNSAGTPKPKRKDQYRFSYQTKNSYPAKSRQAGEDIFNGAKVKVTDNHHIQIPKVGRLKASANNIKHLPHEKGVRIGVTTIKQEPNGAWYVSFQIKADHPLKQALPKTGSEIGIDLNLSNFLTDDQGHQVPNPRYYRKMLTKLAKQDRKVARRRRRAKKEHRRLLDSRNYQKARRQRANLHSHIAHQRNDFLHRTSTVLIQNHDLIVSEELRGKNMLKNHALAMSISDVGWRTFISQLEYKAELYGRTYITVHPAYTTKRCHCCQAINQQVKLGQEEWRCPNCHVFHVRDHNAAINIKNKGLALLQEA

SEQ ID NO: 3205 - protein, 470 aa, unidentified
  REGION 1..470: note = Table 20
MLFAKEVKIMRKTEMKYMLGLKMRAFPNHKQKKIIKKNTDASRFVYNQLLANSYTDSAIHRNKLDKKYPIPKYTVRFNRIKKCFIVHQNWRYNKKGTLITKSTKRKTGLDRITADKYPWLGDKDLDSLTAYNAQINYQSAWKTFRQVHDAGVPKFKRKSASKQSYSTNCQYVGLDKKHGEVPNLFNGTVRFLKQNPHGYCHIKLPKLGKIKVYLSKELPKAKEIRIARVTISVHSSGEYYISMLIKSNDPLASLYPKTGSALGYDLNIKNFLIDTNGNEVANPKYYRRMRDKLAKEQRILSRRCRRAKKTKHKLSECKNYQKQKLKVAQLYRRIYRQRNAFLHNLSTALIKNHDLVVGENLKSRNMLKNHALAMSISDVGWRTFIGMLEYKAPLHGKTFVLVNPAYTTQTCYDCKFVMGKKGTKKLTLQMREWDCPNCNAHHIRDYNAAKNILGKGYMALKIPDYEYKFS

SEQ ID NO: 3206 - protein, 383 aa, unidentified
  REGION 1..383: note = Table 20
MIQKKAYTFRLYPTKEQVTFFHQCMGSARFLYNAMLGEFQSRRKAGVPPFPLPKVTDYKKSFPWMKAVDSLALCNAHRNLVQAFINHRDHPEHFGLPMFKKKGTFPWTYTTNNQKGTITIVGNKIKLPRLKRLVPIHLHRQVKGVIKHATVSRQANGQYSIAILVEEDVKELPKTGKSVGVDLGLLDFAALSNRNKIPNPHFSKPFERRLRREKRKLSRRIVKAKTLVQKDPNKNWRDCSNLEKQRLKVAKLYAKVNNRKTDFLHKRSTELVKSHDLLVVEDLPVKRLVKNHHLAKSIHDVSWSRFTDMLKYKSKWYGKAFIKIDRFFASSQICSACGHKDGKKALAIREWDCPQCGTHHDRDINAAINILNEGRKRVAASKT

SEQ ID NO: 3207 - protein, 382 aa, unidentified
  REGION 1..382: note = Table 20
MLMAVKYRIYPNKQQASLIHKTIGCSRLIYNLMLHDFYENDLIKTPAKYKNEYPFLKEVDSLALANSQMNLKKAFRNYKNNKEHFDKPKFKKKSHSKLTYTTNNQKGTIRIENNKLILPKFKSGIKIVLHRLIDGVIKSVTIEQVPCGYYTASILYDVPDTNKKPTLSKENIVGIDLGLTHLAITSDHKKYENPKYFHKLQAKLRKEQQTLSRRWEQNIEKYIYDNEGKVVKTIYKKPLRDCKNYQKQKRKVAKIHNKIKHQRLDNLHKVSHKIVKNHDYIVVETLKVKNLMQNKKLSKSIADVGWSMFINMIAYKTKRYSKELIQIDQWFPSSQICSHCHQNEGKKALSIREWTCTSCHTKHDRDINAAINIRNKGLELIS

SEQ ID NO: 3208 - protein, 402 aa, unidentified
  REGION 1..402: note = Table 20
MQKGYRFRLYPDVDQQTKLRKNIGCARKMYNELVNDEDVNYHLDEVSPLPFGKKRKRLTYTQIKAQFPYMKDVDNLALANAQMNYRAGRKRFFDNLRNPSGRKISLPKKKRKSKAKWSYQTNNQTPKGVVAQNNVNGSVRFSHNYKYIQLPKVGLIKVKAHRRLQQLWRISTVTITQERNGQWYISLLMEIGEITKPEKTGAKLGIDLGLKDFAITSDGVKYNRPNDVALDKKIRRAQRKLSRKYEVAKEMEKSVRFAANYQKQKVIVAKLKAKRAAIRKDFQHKLSWEIINNHDDIRIENLQINNMMKNPKLARAIQESAWYQFTTMLLYKANMYDKQVHKVSMWFASSQICNECDWHCHKFGMTTNEWLSVREWTCEQCGAVLDRDVNAARNIRDTEQVA

SEQ ID NO: 3209 - protein, 394 aa, unidentified
  REGION 1..394: note = Table 20
MQQAFRFRLYPSAMQIIKLRQNIGGARFMWNALVADEMVQYKADQNSPLPNGKKHKRLTYTQIKKLQGNEWLSKVDSLALANVSQKYRMARKRFFNWLNKRNGPKVGMPKLHKKWSSKWSYSTNNQPATADIYHGSIRLDATNKHLTLPKIGGIRVKLHRQLERDWHISTATVTEEKSGKWYITLLVEVGCIPEWPKTGSIIGVDLGLARFLTTSDFEIIKRVRFIKSAESKLKQAQRKLSRRRAMAKKLNKPLAQSKNYQKQRVLVARIHEKIKNQRLDFLNKISTRLVKNHDIIGYENLSPRNMRQNRKLAKAITDVGWTSFLLKLQYKAEWYGKKVIGVSAAYTTQMDYETGEVAAKPLNVRSYTNSIGSTVDRDLNAALNIRDRALATLQ

SEQ ID NO: 3210 - protein, 368 aa, unidentified
  REGION 1..368: note = Table 20
MKKAHKIRIYPNQRQQIQFQKTFGCVRFYWNFLLDQRITNYKMKKENADYQEDKTTYAALKKMDEYSWLKEVEAHPLSQVTMDLNKAYKNTFKSNFGFPKFKSKKYSKKSYRTAMGMKVNNNYFYVSKVGWVKMAANLRFNGKLMSVTVSQSKSGKYFATFLVDTENFQKEPVEESIGLDLGIAHFCITSAGEKIDNEKFYRSMEKRLVIEQRKLSRRLEVAKKHNRKLDECKNYQKQKLKVSHIHEKIFNQRSNFLHQLSSRITDENQIICIEDLNVKGMVKNHKLANVSWSEFVRQLAYKCEWKGRTLVKVDQFYPSSQICSLCGHKDGKKELNIREWTCSNCGTHHDRDINASINIKTEGLSGIA

SEQ ID NO: 3211 - protein, 228 aa, unidentified
  REGION 1..228: note = Table 20
MSPIPETIRPEKSIGIDLGLSHAFILSSGYKENNPRFLNSELPKLRVEQKILSRKKIGSSKRKKQKKKVAVIHERISQKREAFLHEKTTELVIKSQVTSFVVEDLNIKGMTKNRKLSRHINDVSWGNFIRILKYKSEWHGKNVITVNRFFASSKICHSCHYKMDEMPLSIRYWLCPECGKEHDRDINAAINICHQGLADSLGHSDYVKSSLVAIPVSAGATTKAIGMS

SEQ ID NO: 3212 - protein, 393 aa, unidentified
  REGION 1..393: note = Table 20
MSLILTAHKMRIYPNNEQISIIETTFGAARRMFNSLHAQFEERSKMSTVERENHIYKNYTALKNEWDNENNWLENVASQALANVSLNYNKAWSNYKKNKKHYKIPTFKSKHIARKSYSLNRNNVKNDIYISKENNKLLKVPKLGFVRLSQKLRYKNYNLKKITISKSTTNNYYISILVAIDKKSLNHKGLKIKSNDKVGLDLGLIDYIVDSNGNKINNPKYLKKFEVKLAKEQKILSRRYEQAKKDGRLLSESKNYQKQRLKVAKIHEKIRNVRNDFLHKLTNTITNESQVVIVESLNVKGMMKNRNLSKHISDASWGEFVNQLEYKSERKERTFVKIDTFFPSSKMCSDCKEIHELTNDLSVREWQCPSCNSIHDRDVNAAINILNEGLTLI

SEQ ID NO: 3213 - protein, 300 aa, unidentified
  REGION 1..300: note = Table 20
MALANVQLNLNQAFQKFFNGEASHPRFKKKKVCKDSFITNNVSGNVRMEGKGIRLPKLGILTLIRHRKVKAGGKLKSVTVCHEKDGKWYCSISFEYPKTEPVYPEPSEDMKHIGLDMSAPHLYVDSNGELADFEKPYKKLQEKLAQEQRKLSHRQKDSKNYEKQRKVVARLHAKIKHQRKDRLHKLSEQLTREYDLISVEDLDMSALKQTLNLGKSYSDNGWGMFVTMLLYKGKRNGCYIIKIDKWFPSSKTCSQCGYVHKELRLSDRTYVCPVCGNLIDRDEQAAINIDLEGLRILLSA

SEQ ID NO: 3214 - protein, 641 aa, unidentified
  REGION 1..641: note = Table 20
MAKSKTLGVRKNENVDVLCYRFAALPTNEQIIQLNKTIGCCRYLWNRMLGDHNTLYQEIGVVPNNTPADYKSLEECLWLKEVDSLALANVQLNLNQAFQKFFNGEASHPRFKKKKVCKNSFTTNNVSGNVRMEGKGIRLPKLGILTLIRHRKVKAGGKLKSVTVCHEKDGKWYCSISFEYPKTEPVYPEPSEDMKHIGLDMSAPRLYVDSNGELADFEKPYKKLQEKLAREQRKLSHRQKDSKNYEKQLKVVARLHAKIKHQRKDRLHKLSEQLTREYDLISIEDLDMSALKQTLNLGKSYNGDSYPGILSIYKEYLKEKNPQKKKMTYDIFRQGLEIQDLDPITYQIIAKNKNSIGHWFPELTEAVKTQDFFKIPNTTIIQVPLPLLQLTKLDYMGLTKTSLEIADRFCEKAFSLDRQKEYFIKTGVFSSKYDFRNAHIQGAEEVRTIGEYLLFIHFQASSMAHFDLNGRNQPVIYGPGTTVEWVCREFIQDKEQNPCIYKGLPLHTEYRVFIDADKNDVIGIAPYWDPDTMKKRFGHESDKDSPHQIHDYIIYMAHENILMKRFDENKDSVVQHIKDMLPDLNLTGQWSLDVMQNGNDFYIIDMALAAESALKNYVPKGRLHPVKEDWIPELMKRDCYK

SEQ ID NO: 3215 - protein, 407 aa, unidentified
  REGION 1..407: note = Table 20
MKLRAYKFRGYPDEETEIILWNYINGSRGFWNILCAEERKYLATKGMLSPSVKTPGSYKKDPHLAWLRSIDSLALANVQQHFETAKSAFRSGDAGRMHFKKKGHCRNSYTTNCSNASKPNLTLVDDLLKLPKVPHKIRLTVHREIEANGRLKNCTVAREGEGWYFSLLYEYDKESISISPYEKDLSECSHIGLDMSLPNLYVDSNGDIPDFIKPYRAMETRLKKEQQRLSRKERANIHHYDIRNGKRYPVYKRPLSECKNYQKQKRKVERIHARIKHMRDDMLHKLSAELTDCYDIISIEDLNMKGIIRSLRLAKSASDIGWAKFVTMLTYKQERKGHVLIKADRFFASSRTCSVCGNIHKELKLSDRVYVCPHCGSVMDRDHQAAVNIDREGLRLYEEFRMAELSA

SEQ ID NO: 3216 - protein, 471 aa, unidentified
  REGION 1..471: note = Table 20
MARRKVKITDFIQTCETNSRLQYLADSFMPSCSLYDVIDGNYVPPQKEKTRKKSSSRRMADADTMFIAYRFRGYPTEEQESYLKQNIGAARFMWNRMLSDYELMWRELWKTIPMTPADYKGTSGLEWLSDVDSYALLNVQLNLEKARSDYFSGDKGKPRYKKKHCCRDTYTTNFCKNNIRFEGDGIRLPKIADPIRLSMHIPVRPGGQLKNVTVIHEPDGKWYFSIVLEYPAEEAEPSFGLQQFFKTGDRDAVSAIGLDMSVPFLYVDNTGKKPSYEINGNEIRFMKQYRKLESRIAKEQRRLSHMVKDSCNYAKQCQKIARLHAKAKHRRDDFLHQIAVRLVRKYDLIAIEDLDMAAMKKSLKLGKSVSDVGWGKFTQILEELCNKFGKLLIRVGRWYPSSKTCSHCGSIDKDLKLNDRVYECSECGHTMNRDKNAAVNILEEAFRILEENMFRPSVEGYKKPALISTIA

SEQ ID NO: 3217 - protein, 401 aa, unidentified
  REGION 1..401: note = Table 20
MEKQNKAYRFRIYPDEAQKAFILRTFGCCRFVWNHLLDERLSVLETTGRYMNSTPAHLKAEYAFLKEVDAQALCNVQMQLNKAFADYKRNPAYFKKPCFKAKHHSRNSYTTNLIKGNVRINQKEKTIRLPKVGEVRIVLHRNLKKEERIKSVTVSMESGGRYYVSVLVEYSAKNTAPVPVDAANVLGLDYSSPFFYVDEHGDKASNHRKFFRENEIKLAKAQRALTRMKKGSNNWNRQKTKVGAINAKIADSRRDWIEKETAALSVRYDAIIVEGINMKDISQGLHLGKSTLDNGWGLFRQRLEEKLHAKGKQLVVLDRWEPSTKKCCRCGALIPGLTLNDRIVTCPSCGSVMDRDVQAAMNIKQSGMKLLWDAEVEPVDTGDQISLSRKERCPDTYSVVR

SEQ ID NO: 3218 - protein, 378 aa, unidentified
  REGION 1..378: note = Table 20
MNRSFKYRIYPTAQQALLIAKTFGCCRKIWNLMLDDKLQEYRAGRKMSRQTPAQYKKDYPYLKEVDSMALINVQLHLEEAFRSYFQQPRKGLPRHKTRKRSSRRYTTNLIKNNIEIGRNWIKLPKMGKVRAKIHRALPLGAHIKSVTVSQDGCGDYYAGVLVEIDPLKTKQNIDRLGAIEGTASIGLDYSMPSFFVSTSFPASHPRPMKKNQERLARAQKSLSRKRRGSANYRRQQKRVARIYRKIADQRRDYIHKASREITNRFDVIGIEDINMVAMSRVLHFGSAVFDNGWSLFVHCLTYKAEEQGGIVTKVGRSYPSTKRCSQCGIVNQEIRLGDRSWTCPNCGAFHDRDKNAAENIRQEAVRIMMSRQPQGMRG

SEQ ID NO: 3219 - protein, 391 aa, unidentified
  REGION 1..391: note = Table 20
MSGKSREDRTKTLRSSRYTVLKVPAYPTPEQAELMEKTFGCCRYLWNQMLSDVQEFYAATDIHYIPTPARYKKEAPFLKEVDSQALCAVHQSLRKAYLDFFRNPKAFQYPKPKTKKARKDSFTVYCRPYHTGPSLRLTSAGLQMPKLGLLRVKLYRKPLHWWLLRSVTITKTKTGKYFCSITFGYEAEAPKPVVPTPERTVGLNYSMARFYVDSNGGSPELPPQMAAAREKLARMQSKLSRMQQGSRNYEAQLYKIRLQYEHIANQRRDFAHQQSRRIANAWDAVCVRDDDLNVMAQRLKGGNVLDSGFGMFRAFLRYKLEAQGKPYIDVDPYAPAAKTCHACGHVNEKLPMRARDWVCPHCGEELLREKNTARNIRDFGLAAFSRQAGVA

SEQ ID NO: 3220 - protein, 412 aa, unidentified
  REGION 1..412: note = Table 20
MKHKKSNRGEPMAGKEKAFKESGKCLQYITIKARLYPTEQQAELFEKTFDCCRYLWNQMLTDQQRFYLETGAHFIPTPAKYKNLAPFLREVDNQALIQEHNKLCQAFRVFFKNPESFGYPRFKRKKDDKKSFSACNHNFPSGPTIYTTKDGIRMTKAGIVKAKFSRKPRADWALKRITVQKTKAGTFYCYLVYAYRVCTPKAIQPTEERTVGIKYSVPHFFVTDDGTTADPPHWLRESQEKLANCQRKLSRMQPGSKNYQEMVQKYRALHEHIANQRRDFIHKQSSQIANDWDAVCMRDDALDEMSRTMNRANLYEAGFGMFRECLKYKLARQGKQYILVDRYYPSSRICRHCGYELPQAADYNRQTWNCPQCGALLNREVNAAQNIKQAGLRQISSHGETCKPCKKSPPQK

SEQ ID NO: 3221 - protein, 188 aa, unidentified
  REGION 1..188: note = Table 20
MGLKYSMGHFYVADNGEMADPPQWLKDSQEKLAKLQQRLSRMEPGSKNYEEAVQKYRLLHEHIANQRRDFLHKESSRIANSWDAVCMRSEALREMSQNPLRSGAASAGYRMFRELLRYKLERQGKQLILLDRYTPTTRTCSVCGQLQGGVDYGAKTWTCPRCGTTHDREVNAARNIKAQGLAQLAACA

SEQ ID NO: 3222 - protein, 286 aa, unidentified
  REGION 1..286: note = Table 20
MAYKNFFNKKANYPKFKAKKQNKNSYTTSCCHRNIEIGTNQIKLPKLGWIKASICRKPKPNWIIKQATVSMKFNGELYVSVLFAFTKEISFVIPTLDTTIGLDYSSPNFYVDSNGHKPKIPYPFRKSEKKLAKEQRKLSHMKQGSNNYNKQRQRIAKIYAKTANQRKYFCHKESKKIANSYNVVAVEDINLKAMAQSLRFGKAVNDNGFGTFRYFLEYKLKEQGKYFVKINKWYPSSKTCHYCGTYNPNLKLGESKWVCSHCGIAIDRDINAAINIKNEGFKMLTN

SEQ ID NO: 3223 - protein, 392 aa, unidentified
  REGION 1..392: note = Table 20
MQRAYKYRLYPDKAQTEYFNKCFGCARFIWNRMLEDKEKYYETEHKLLRLTPAKYKDDYPFLKEVDSLALANVQLDLEGAFRAFFEKRTGRPRYKSKKRSRASYTTNNQNGTVSVTDRSVRLPKIGYVKAVIHRDIPAGSKIKSATVSRTAAGRYYCSVLCEIPDDIRPSLPAAEERKVMGIDYSSPHFYVGSTGHSADEPHWLRIQEKKLQREQKKLSRMIQMNISGYTGKRVPVYKRPLEECRNIQKQKRKIAVIHEKIANQRNDWCHKESRKIANSCDAVVLEDIDLRGLSGSLRLGKATNANGFGMFRTYLKYKMEEQGKYVIMADRFFPSSQICGVCGCKNPSVKDLKIRKWVCPDCGTEHDRDINAAINLRNEGFRILRTNNTAVI

SEQ ID NO: 3224 - protein, 367 aa, unidentified
  REGION 1..367: note = Table 20
MGYRYRVYPNKEQQIFFAKTFGCCRFLYNKMLEDKQTYYKQTGKWLNCKPSDYYDAYPFLKEVDSRALKNTWLNLIKAYQNFFKNPNKNNFPKFKRKHISKDSYTTEQNKGRNTIRVTGNKINLPKVGLIKAVIHRPLPDGAVIKSATVTRTKSGKYYVSLTVEQAVKPCKPVQPNFDTTLGIDFSFRSFYVDSNGFSPGNPHFYCQLEEKLKREQKKLASKVKGSNNWIKQKIKIEKIQEKIKNRRKDFCHKLSREIADTYNTVCIEDFSLKEFAGSRQLGKSMFDCGFGMFRNFLKYKLAEQGKFLITIDKWFPSSQICNNCGYVNHNLKIDEKQWICPSCGLTLDRDINAALNIRSEGLKQICK

SEQ ID NO: 3225 - protein, 405 aa, unidentified
  REGION 1..405: note = Table 20
MAHVPVIKCRQYRIYPDSAQQVLIWKTFGCCRWMWNHLLDERIQSNKVMGGDRFRNTTPAHFKKDPENSFLKEVDSLALANEQLNVNQACRKLFASGRTPRFRAKGRDRRSYTTNAVNNNISIIRVSDTENYLKLPKLGLVKIILHRSIPGGGVLKHITITERASGRFYASLTYEVMQEEVKPVAEFNKIESFDYSMPNLAVSASGKYDVKGEDIHWYRRMEQKLKREQRKLSHMEYGSSHYWKQRHRIGSLHEKIANRRKDCLHKLSRAVADCFDAVVVEDIDLRAMSQALHFGKSVMDNGFGMFRVFLAYKLKEQGKVLVTVSRNFPSSQRCSACHNINPEVKNLSVREWICPVCGAVHDRDKNACANLRQEGIAMLNRRACGDSSLILAPSGVLSEKKPHLL

SEQ ID NO: 3226 - protein, 210 aa, unidentified
  REGION 1..210: note = Table 20
HFGKPQFKSRKNRQSYSTNNQKGSVRIEEGRIKLPKVGWVKVVQHREIEAKSTIKTVTISKTPSSEYFVSILVEYEKQVLQVIPRNVVGLDYSMKELYVSSEVEIPEYPHYNCICIEELNMKAISKALKFGKSVHDNGWGMFTRMLEYKCEWYGKTLVKIEKYEPTSQKCHCCGYKNPETKDMSVRFLVGQASQLSLADTVQENAEASAN

SEQ ID NO: 3227 - protein, 464 aa, unidentified
  REGION 1..464: note = Table 20
MKLDNNAHSVFSLNYHLVLVVKYRRQIFNDDISDRAKEIFEYIAPNYNIILEEWNHDKDHVQILFRAHPNTEISKFINAYKSASSRLLKKEFPQIRKKLWKEHFWSQSFCLLAKTFGCVRMVYNHWLDRKIRQYEENKTNVTYTACAKEMAEMKKTEEYAFLREVDSISLQQSLRHLDTAFQNFFKQPKTGFPRFKSKKRNKNSYSTVCINSNITISNGYLKLPKIGQVRLKQHRDVPKEYRLRSVTVSQTSSGKYYASILFEYEDQVQEKEIETFLGLDFSMHGLYRDSNGNEPAYPRYYRKAEKKLAREQRRLSKMQKGSNNRRKQRMKVAKLHEKVCNQRKDFLHKQSRQIANAYDCVCVEDLDMKAMSQSLKFGKSVSDNGWGMFTTFLKYKLKEQGKKLVKVDRFFASSQICSACGYKNMKTKDLALRQWDCPQCGTHHDRDINAAINIRNEGMRLVMA

SEQ ID NO: 3228 - protein, 211 aa, unidentified
  REGION 1..211: note = Table 20
GKYYASILFEYEDQVQEKELQKFLGLDFSMHELYRDSNGKEPAYPGYYRNAEKKLAREQRKLSRMQKGSNNRNKQRIKVAKLHEKVSNQRKDFLHKQSRQITNAYDCVCIEDLDMKAMSRSLNLGKSVSDNGWGMFITFLKYKLEEQGKKLVRVDRFFASSQTCSVCGYKNAKTKDLALREWDCPQCGTHHDRDVNAAVNIRNEGMRLVNA

SEQ ID NO: 3229 - protein, 364 aa, unidentified
  REGION 1..364: note = Table 20
MYRTYILRLKPNRTQTKLLDKTISCVQKFDDIYFAQIKDTKIKSHREMLNIARNTDEDLKSIDDNILFCEIDILKDVKNKKNFFSKFQFKTNLCKYASSIDEVIFNDSINIPSIGTIKLFNKRDYDQVEQFKSIIVYRTIDDKYFVNILFKKKGNKITKELDPNNSIGLDYSSPNFYVDSNGETPDKPVIIKKYDKQIMKLQSKLKESEDDEKLHHKFSIEYANLYNDIKNERKDFIHKTSTKLANQYDYVFVENIDLAKIATHRNLGKATNDNAYGKFLKVLDYKMNDRGKKLIRIDKFYPSSQICNNCGYTYQDLTLKQRKWICPECGVLLDRDINAAINIRNRGIQLVNKRTAGQSASYFA

SEQ ID NO: 3230 - protein, 358 aa, unidentified
  REGION 1..358: note = Table 20
MEIIRQYKYLIKPNLTQKQIINDIFGSVRFVHNRFLDDVKAGKFMKGKAVLILEEYREEYPFLKTVDGSALMNAIFQAQDSHNRLSRYKSKRDSYASYTTGNLPRSPIKILNRDRVLIPKVGKVEIVYHRPLPKESVIRKATIMRYPDGKYYVSICVSWDLPDTPIFPDQNRIIGIDYSSTHLFVDDKGNKADMPHYYKEMQERLTKERKKMQRMVKGGKNYYKQRMKLASLYHREKNQRQDYLHKLTSQLADQYDVICMEDLDMQSISQFHSLGKRTYDNAFGIFQRMLEYKMKERGKKILYVDRYYPSSKTCHVCGYVVKDLQLSEREWECPMCHSILDRDVNAAINIKKQCLKNL

SEQ ID NO: 3231 - protein, 366 aa, unidentified
  REGION 1..366: note = Table 20
MKITRQYNYPLKPDKHQKEIMMKIFGSVRFLYNHYLDSLKEKKSQYRLAKEIVLEYKIKYPFLEEIDNSILMHVIFQAQDNIKNLHRYKKRRDSFCSFTLSNLYKRPIYIVDEKWVTIAPLGKVKIVYHRRLPSGAKIKKATVFRQAEGKYFISICVESEKNPPFKHLNPQNSIGLDYSSAHFYVDSNGNTAGLPHFYRNKEKRIAALDRKIRNSTPGSNNYFKYRQERAKIFARITNQRNDHLHKLSTKLSREYDIICVEDLDLKEIAEKENLGKSTLDNSYAKFVEMLKYKMEEQGKLLLHVNRYYPSSKTCSGCGFVIKELPLDERTWTCPNCHMTMNRDHNAAINIRNKCISNHFGRRVFGL

SEQ ID NO: 3232 - protein, 364 aa, unidentified
  REGION 1..364: note = Table 20
MKKYRSYKYLIKPSEEQKEKIKKIFAYVRIVHNLYVCDVKEGRNINRLAKEILPIYIKGNPKLKEVDTSALMNKLFQLQESKDKLSYAHKKQINSYTTSNLYIGNGTIIYKGDYVNLPMLKDVEIINHRPLMENSRICKATIKKDNLDKYYISILVSYEWINPKNKLDLENSIGLDYSSPNFYVDNNGYSPDKTRFYYDIEKRVTKLHKILDSCERGSNNYKRCKEKIAKIYKKCANQRNDFLHKESKRIADKYDIVCVEDIDMVDMSHKLNLAKRTYDNSYGSFITLLKYKLEEQGKILEKVKRQYPSSRICHICNHEYKELTINDREWVCPNCHNKLDRDINAAINIRKEGIRQLSCRRAFG

SEQ ID NO: 3233 - protein, 355 aa, unidentified
  REGION 1..355: note = Table 20
MNRSYRYLLKPDRKQKDIINGIIRDVNFLKKHYLEDEEKGRKFDRLLKDVLNGYIREYPELRNSDKSALLNVLFQISGKKRRESGKIPYTARYTTSNYHGKIKAGETVWLPLVGEVVMVYHRPVPKECEIKSATISRNNLGEYHISFLTEFDCGIRNLKLDVRNSVGLDYSSANLFVDDTGRRIDIPHFYREKEKRIIKLIDEMKRCEKGSANYFEKRNRLNRTYKNIASRRSDYLHKLSASIAEQYDIVCIEDLDVQSISKLKNLAKATYDNSYTLFTNMLKYKLEERGKKLIMIDRWYPSSKKCSCCGAVNTDLKMGERVWTCSRCGETHDRDINAAVNIRREGIRKYLNAVG

SEQ ID NO: 3234 - protein, 359 aa, unidentified
  REGION 1..359: note = Table 20
MEVTRSYRYLIMPDAAQKQKIRDIIRLSNKAFNMYMEEVKNGSRQTRVTDIVKRYKNICPEFKSTDTSALYNALFQATDKIEHPYFRRNNVEVASYTTAVLERANNAARLYEDKEILYLPYVGDVKIKMHRPLPENIRIKTFTVKKDNDTYYGIVTFVKNVLNAFDSNLDLKNSIGLDYSSSCFAVDNHGLRYDVPHFLRSNLDSIKKMMICLEKYEKGSDDYNAIIRKLRKLHRKIANRRKDFLHKLSCEIAENYDYVFVEDLDMNQYTDKSNLSRATYDNSYAKFVNMLQYKLEDKGKKLVKVNRYFASSKICSECGCLNENLKLNEKNWTCPHCGSYLDRDVNAAVNIRKEGMRKV

SEQ ID NO: 3235 - protein, 223 aa, unidentified
  REGION 1..223: note = Table 20
ERDGSYYCSVLFEYESNVTPVALNSDNVIALDYKSDGLYMDDKGNCPDNHKFYRESARKLAKAQKKLSRKVGSKKKETKSKNYLKQLEKVNKIHRHIANQRNDFLHKQSDAITKRYDVICVETLNMRAISNKKFHNGKATMDNGYGMFLNMLEYKAANRGKYFVKVPWNYPSSQTCHNCGEIHPEMKDLSKREIRCKCGYHNDRDVNAALNIKSEGLRILGLA

SEQ ID NO: 3236 - protein, 390 aa, unidentified
  REGION 1..390: note = Table 20
MVITHALKMRIYPSKDQSKKIDQTLDCCRYVYNHMLYRNQLVYERRSEHLSYYDMQNLLPTMKEYLPWLRDADSKAIRFACRQVADAYDRFFKKQSKFPKFKSKRNPLQSYTTEHPTTIRYDVNSVNLPKLGEVKHSDNRLLPDDAKICYATISKENGKYYCSVTYKYDKDVVPVPVNENQVIGLDYKSDGLFMDSNGVIADMPHFYRNAQKRLRKAQRKLSHMIESHSAGYKTVFGKRYPIYDRPLETCRRVQKQISKVAKLQEEVANHRNDYLHKLSFQMANVYDAVIIEDLDMKAMSNKGFGLGKATMDNGYGMFANILEYKLIERGKQLIKIDRFLPSTQQCSRCGSIKKIPLSQRVYSCDCGLTIDRDLNAAINIRNEGLRLLTL

SEQ ID NO: 3237 - protein, 228 aa, unidentified
  REGION 1..228: note = Table 20
PAGAVVCLATVERTRRGKYYVSITYSFEKDVPAKPYDPALAIGLDYKSDGLFAASDGSFACMPKFFKESQDKLAKRQRKLKHKVLGSNNYRKEQDKIYKLRRHSANQRKDFLHKLSTQIANEYSLVCAEDLDIKAISNKGFKNGKATLDNGWGMFTQMLSYKLAERGGKLVKVDKFYPSTQLCSVCHSRRKLALSERIYKCPVCGNVADRDINAARNILAEGIRIFTS

SEQ ID NO: 3238 - protein, 386 aa, unidentified
  REGION 1..386: note = Table 20
MIITKAYKTRIYPTPGQEAKIRKTLGCCRFIYNHMLERNQKLYKRKKKHLSYYDMQNLLPVMKGYLPWLKEADSQALKFACRQLNDAYGKFFRKQGGFPKFKKKRGRQSYTTTAVKQIAWEPGQVKLPCLGEICMKDKRKLPKNCKICRATVSLDPDGRYYVSVSFQYEELVPDRPVAESSTIGLDYQVGCLYVDSSGNRKSFPHWYQDSLMKLAREQKNLSRKQGSRKGEKRSGRYKKQLKKVAALQSKISRQRQDLLQKTSTQITNSYSVICIEDLSIKDMMNITGPFTKRQKKWIRMAVLNTGWYGFTQMLVYKQKYSGGKVIKAGKYFKSSQTCSCCGSVNPDVKDLSVRTWTCPECGSKHDRDINAAKNIKSEGLRILIKL

SEQ ID NO: 3239 - protein, 370 aa, unidentified
  REGION 1..370: note = Table 20
MKVYRGVKYRLYPNDEQVQIIEKTFECCRQLWNKTLEHKLELYEKYKKNININYTEHMDECTGYDEVDEMAFVNIYYDLENSFRKYMKGDGKPKFKSWKNPRRSYRTINKNESVMIEDRYIHLPVVGKVKARGWFGKENNGIYSVTVKRHGSGEYFASVNYIVDRNVKRVVPRKIIGLDYKAKGLFMDSNGRIAKGRDFNKEAVKKLRREHRRLTRRMGARKGEVKSKNYIKQERKYAKCCEKVANQRDDFLHKLSRRVVNENDAVCIEDMSMKDISKRKQRIRFAKSTYENGYYQFTQYMAYKLDDAGKTLVKVPKYFPSSQLCSKCGTRNDITLDQRVFYCPKCHKAIDRDINAAMNIRNKGRQMLSV

SEQ ID NO: 3240 - protein, 380 aa, unidentified
  REGION 1..380: note = Table 20
MKRYKTYQYRIYPTSGQADLIERTFGCCRFVYNYYLELQTKNHDAGGGYLSKTKTNNLCNRELKDEYPFLRDVDKFAITNAIWNLDAAFQGFFKKRTSYPKFKSKRHSKRSYQTNYSNGNIAVLENAVKLPKLGAVKAVVHRPAPADWKLKSATVFQKKSGAYYCSVLFEYEFEEKNRQLDLSTAIGLDYKSDGLYVSDSGSVCGSPKYYLENQKKLSWELKKLSRKKPGSKNYEKQRLRVAKQYEHIANKRKDFLHKEALSLAMNHDVVIVEDLDMRNMAQKPLRIGKATMDNAWGLFVDMLEYKLEERGKRLIKVDKFFPSSQLCTLCRQQNRKVRSLSVREWECPVCHAIHDRDINAAENIRREGVRIYWKTQQQVA

SEQ ID NO: 3241 - protein, 383 aa, unidentified
  REGION 1..383: note = Table 20
MKKNKAFKFRIYPTSEQKVLLGKTFGCCRLVFNYFLSLSTKKYEEEKITLKYKDYALMLNDLKREKEFLKEIDSISLQQELRHLADSFNNFFKYKKGYPKYKRKAMHNDSYSTMNVNDNIEILNKKYIKLPKIGKVQCKVHRDIASDYQLKSATISRVSSGKYYVSVLYEYEKESINYKIDESKILGLDYQMKNLFISDDIIKTNDDFLKLYIKNEKRLHFLQKTLSRRQRPNHKKEIESSKRYEKQRIKVAKLLEYQKNKRNDYYNKLSKEIANQYDIVVIEDINMQDMSKESKLNSKATYDNGFGIFRNMLKYKLEDLGKKLIIVDKYFPSSKLCNVCGHKNELLTITDKTWECPNCHTVHNRDINASINLKKEGLRIYNS

SEQ ID NO: 3242 - protein, 383 aa, unidentified
  REGION 1..383: note = Table 20
MLNKKVKRTYRFRIYPNPSQKELIEKTFGCCRQVYNDFLSMCIESYKADKNRTINKYELMKLLPEYKETFPYLKEVDSIALQQTVIHLFDAYMNFFRHNAEFPKFKKKKNDYGYTTMNNNNSIRFIRDDIQIPKLGRVKVKAHRHLPESFKFTMVSVSRQGKYYYVSLLGEEEYFDYGEYIKESLDPNNSIGLDFSLSHLFVDSNGNHLDMPTYYQDSLTKLAKEQRKLSHMKKDSTHYQKQLMRIKNLHEHIANQRKDFLHKVSRKLANTYDYVFVENLDLKEMSERKTDSKLGISIFDLGYGTFLQYLSYKLNWLNKKLIKVNKYFPSSQLCSCCNYRKSDLTLAQRSWVCPICGFKHDRDYNAAINIKKEGIRMILNPSN

SEQ ID NO: 3243 - protein, 387 aa, unidentified
  REGION 1..387: note = Table 20
MSYIVSVIRGYVYRIKPSNYQKELIEKTFGCTRQMWNVLLSERETIYEMYREYPELLHSHTYTNPAALKHFYEYMYEVDSQALTTSWLNQKNAFTNFFNGTHDKPRMKSRHNPVQSYTTHTISNNIRLDGKKLKLPKLGWIKIKLHRDLPNDSIIKAATIKREAGKYYVSLRIQYEQETPTIKRNSIIGLDFSLRHLYVGSDSTYGEYPMYFKNSLDKLARAQRVLSRRKKGSHRWEKQKRQVQRIHQHIKNQRNDFLHKASRYLVSNYDMICIEDLDLKEIAKNKHFRKSISDTSYGTFTRYLEYKTKDEGKTLIKINKYYPSSKTCSICDELHDISLSQREYTCDCGNEMDRDLNAAINIATEGLSKYLYKEYGTDSIARSSCAH

SEQ ID NO: 3244 - protein, 394 aa, unidentified
  REGION 1..394: note = Table 20
MEKFIKYKTFTFRAYPNKSQTNLIYLTFIMCRYMFNTLLSIELENLKKYNNEVEKCLKSYKYFDDKKFAKEHKMPKISKLKNSNENYKKVDSLAICAEYSNLVRGMELFYRGKSNLPKFKGRNDKHSYTTSQVNNNIRIVNNKIRLPKVGFIKVRGMREIPSNFKIKRAIIFEDKKGKFFISIVFEYEKIDKNDDIYSIKNENKVVGLDFKIGDIFVSSDGFIPKYSNSYFILLDKIPIIQNYVNRKKKFSKNYWKSINKLRKIHRNVVNIRKEMLNKLSYTLSKNYYYVIIEDLSIKEIVYKLGRGKNAYNTSFNSFVKRLLYKFENKVIKINKWFPSSKKCSRCGKKKKHLRLSQRIYRCYFCGNIIDRDLNAAINIKNEGIRLLNTCEFQV

SEQ ID NO: 3245 - protein, 406 aa, unidentified
  REGION 1..406: note = Table 20
MIISRKIRIYPDDSQQTIINNTFDVCRFVWNKLLERSIESFDDGKLIIPNYGDIISEYQFLSKDNKGYVFDRHAVNNVKQFLRLSFSKYFDTIRTKNIKYRKGGKPKGFPRFKSKKFSKNSYASYHHENIHIDYMNHVIKLPCLGWVEYNPREKEFPDDWRLLHITISKSSTNKYYCSLCFECENNQIGYNGLDFLINPKQTLNILGIDYSSSSLYVDSNGNQPGYPKYYRSNQKRLRMLQKRLSRQQKGSVNRNKTIQQIRILYGKISNQRYDFLHKLSTSITKMFDVICVEGIDMKNMSQCLHLGKSTMDNGFGIFRNMLKYKQDRIPFHLMITAEKWFPSSKTCSCCGNIKHDLMLKDRVYKCDHCGNVIDRDVNAAINLKQYAFIHINAIAQRFIDRSFSMN

SEQ ID NO: 3246 - protein, 445 aa, unidentified
  REGION 1..445: note = Table 20
MAADKKGRHIKGTKKQLPDGWITGAFRYAIFPTDEQKQCLEMAFGCERKVYNEYVAGLYDHLEAVGFSGGFLTYRVPNYTTITQRYDFLDRSTDSFVYNDAKIRFQAAIKKYNETYGTRPLHYKKSVQKKMKAGYVPSLQDVKGLPKFHSKKQGGFSYTTNQTNGNIRIEPRDGATFLRIPKFPEGIPVRLHRELPADGLVKKVTLKREGTRYLASISVDYPFEKAPLKETVLAANMTALDYSQSGLYVDSDGKKAGYPRFHELIGKRQRRLNKSLARMKERAMKDENGQPVYSKNYRQTVVHYQKTMAKAANQRNDFLHKRSHQITNDYDAIVVEDLDLTNLAQCLKLGKKLHDNGFGMFRGMLKYKAERKGKHYIVADRFFPSSKLCSACGHKKERLRLSERTYACESCHAELDRDHNAALNLKNYGIHALLDTGFLADPVSN

SEQ ID NO: 3247 - protein, 445 aa, unidentified
  REGION 1..445: note = Table 20
MLELVNRGYVYRASSISQEAETYFRQCFGAKRKMYNLHVAHLYDYLEKSNYQPEDALPSLKKMGMPTVSQFKKQCLNEDNMAYLYLVDAFAANEAKQHFNKAITAFNKTAHKRQYKKSALKRQKTLGIEPTFHDLKGMPKFKSRKGSKASYTTFNQNGTIYIKDDILYLPSAQKSPVKVVGLKLNTHRPLPQDSKIKHVTVTMNTKGQYDVSICVEIPMEITRVGMPNRILGLDYSQSHFFVDNEGKKANYPYYYLEMEERLAKERRVLSRRVKGSNRWEKQRLVVSRLETKVANQRKDWLHKKAYALANRYDMIVVENLDLRAIGQNKYYAKNQQDNGFGNFRLYLKYKLEQRGKYFIKAPKKFASTQLCSVCGHKHTALKGNVSIRKWNCPSCGTHHDRDVNSAFNLKHYGECYTKKKFYHRSLGFNAYKRVAWSPNSTSSLV

SEQ ID NO: 3248 - protein, 401 aa, unidentified
  REGION 1..401: note = Table 20
MIKKNKGYKFRLKPNKEQMIYLEKAFGCSRKMYNLYVDMLYKQLDEKNFINGKIDYKAINLPTPAIIKKDYEYMKEIDSLAFANVQLNFRDAIKKYNSEFDGKTYSKKALKQVETLGKELTFKDLKGIPNFKSKRKNQNSFTTNNQNGTISIVDEKYVKIPKLKEPIRFVNHRQLPGNSIIKSATLSKNCRNQYYISFTVEYYIEEKQTPSKIILGLDYSQHDFYVDSQGRKANYPKYYKKTEEKLKKEQQKLSRKVLKSNNWIKQKKKISKIQNKISEQRKDWLHKKAYNLAKAYDAIIVEDINLKAVGQCLKLSKSLSDNGFGTFRNFLKYKLEDRGKQFIKIDKWFPSSKMCSNCGAIKEKLPLSERIYKCEKCGCTIDRDYNAALNIKEAGSALLAW

SEQ ID NO: 3249 - protein, 281 aa, unidentified
  REGION 1..281: note = Table 20
QSNFPKFKKKGVRDTYRSCVVNNNIRIEEGFLKLPKIGLVEMRMERDLPNNSVIKSVTITKTKINKYFVSIQFEFFKKIKQVEPKSYLGLDYSSPYMYIDSNGKIPDIPKPYRQHEPLLAKEQRKLSRMIHNSNNYKKQLIKINKIYEKIANIRKDFAHKISRKIANSYDVVCVEDLDLVEISKNQRKSKDNMFKLGKATYDNGWGMTRTMIEYKLKEQGKYFIKANKWFPSTQQCSSCKNKNEIDIKEREYQCECGLIIDRDLNAALNLKQYAIEQLARA

SEQ ID NO: 3250 - protein, 404 aa, unidentified
  REGION 1..404: note = Table 20
MRKRKEEDPTRHNKAFKYRIYPTTEQRIMLSKTFGCVRFIYNSELYFGMETYEKTGKPNIMPYARFKGEHEWLKEVDSLALANAQLNLESAYGKFLKEKEPTYSKKTKERAERTGKELTYYDYKWHPKFKRKNEGQSYTTNLVGNNIRILDGKLRVPKLGELKMKEHRSAPNDYVLKSVTISKTPTDKYYASILYEYMREIAEVIPEAIIGMDFSMGNGYVDNEGNKTQYPKHYREQEGKLGREQRKLSHMEKDGANYKKQNIKISMIHEKIGNQRRDYLHKESRKIANFYDLVGVEDLNIQAMAQALKFGKTVHDMGWGMFRQFLEYKMKDQGKHFIKIDKWYPSSKKCTKNKIFESLNDISKLSYDLSSAISDAATGYCKGEMDLDALVSLIEQKIEIYSNE

SEQ ID NO: 3251 - protein, 400 aa, unidentified
  REGION 1..400: note = Table 20
MKRNYAYKIRLYPNKEQAILIDKTIGCCRLIYNLMLSERKEVWEQNKENKEVVYGWKYKTEKQYKEEYDFLKEVDSISLVQTRRHLENAYNNFFKSISGKRKGGQLGFPQFKKKKNGGSYSTQKNAENIRILDNKHIKLPKLGIIKFSQKPNKKDGVIKSATISKTPTGKYYCSILFEQDIKEQPKVALNGNSKVIGLDMSLSNFFVDSNGNSPLFSRRYRKAEKKLKRLQHIESRKEKSNRRNKLRKSINRINEKIQNQRTDFCHKLSTQLVKDNDVIVIESLNLKAMSQCLKLGKSVMDLGYSQFINQLQYKCDWYGKHLVQADKWFASSKICHNCGYKYQDLTLSDRKWVCPNCGTEINRDENAAINLKQLGIGYVHKCTQSQSVMTAMKCVNCDNH

SEQ ID NO: 3252 - protein, 423 aa, unidentified
  REGION 1..423: note = Table 20
MTRTYKYRIYPNNIQSQRLAQTFGCVRKMYNLCLDWWTEAYHKWKNEGIPFGKSPDYGVFAAMEEYFYLNDCEKVALQQARRHFEKAVKDYFNSKKGNRKGRSLGFPQHKKKNKCRDSYTTYNNSNNIRLVDDSHIRLPKLGTVKVALHRPFEGTIKSVCVSRTPSGKHFVSITVDTPEPDKPLVNRVANAANPKVVGLDMSLQTLVVSSEPSDDAIAKRVRLYRKEEKRLKRLQRSVSRKVFKSNNREKARKKCAALHERIAAIRRENAIMTALHYVRKYDVVVIEDLDMQAMLRTLRLGKSVLDIAFGEFRHWLEWEASKYDCYVCVADKWFASSKTCHECGCKNENLKLSDRTWVCPQCRAELDRDRNAALNLRRYFEERYNSTAGTAGIDACGDSASTLRLAVGRALSLKQEARDFSRG

SEQ ID NO: 3253 - protein, 421 aa, unidentified
  REGION 1..421: note = Table 20
MKTFRYRLYPTQEQAEAIRRTAGCVRYVYNGLLNDYKAQYNEWKKNGKPKEHAPKLKEVTFLKETAPFLSEVDSLALANSKLNLKAAFKNFFDSCSGKRKGAKMKFPKPHKKGKSKAIYRTNNQSNSIRIEGDTIRLPKIGNVKVYFHRPCVGAIRSVCVEAAKNGRFYVAILTDCPSETIRNEVSLDNLNIVGLDMSYSKFCVDSDSTEDDTKPKYVRWYRNVERKRNRLARRLSKKEKGSSNKEKARRRLAAFDAHTANRRKDFCHKMSHHYATHYDAIVLEDINMQDLAKRHMKGHGKSVCDLGFGMFKQFLTYKCQRFDTLLVYADKWFPSSKTCNHCGEKNSLLKLNDREWVCPHCGAVIDRDYNAACNLRDYFAKIINTAGTAGIYACGDDASTLRSRAEQALSAKQEAPSFRWG

SEQ ID NO: 3254 - protein, 426 aa, unidentified
  REGION 1..426: note = Table 20
MKKGLEVRLYPSKEQRGLIDRTLGCSRFVYNHVLGMKKELWEDYKLSFNPNLKSFKEEWKFLTKVPSQALANSYMDCMTAFNNFFNSLKGKSKTEQKFPKFHKKGQKDSFRIAATKTSKGYDIRIENKKHIKVPKLGLIKFRNYNVTDWSKIHIYNITIKKTTTNKYFASLCCELLEPEYVEPKFDVCGFDLGIKDFAIFDSGEVIENPKYYRKTEYKIKKTQRVLSKCKKFSKNYKKVQLKLAKLHEKIKNQRKDFQHKISRQIVNENQIIVSENLNVKGMLKNHKLAKSIQDASFGSFFNMIAYKANEQHRQYVKIGTFYPSSKLCHCCGFKYKGLKLEERFWTCPECGTYLDRDENAAINILNEGLRILSRNTNGRSERDESLKPVDTGLVTNLEQEPVITCSKTTSHAGKSSALAEGHLHNF

SEQ ID NO: 3255 - protein, 423 aa, unidentified
  REGION 1..423: note = Table 20
MIVKKGIEIKLYPNKAQKVFFAKTFGCCRFVYNQCLRIKSYIYEETKMSFQPKLKSFKEEWEWLKEADSQGLANAYMDMNQAYQNFFNGKSKYPRYKSKKDRQSYRNAMCHKELDKLIVGNTIVLPKVGAVKCRFGKTFEHERIVKIYNVTIKKSKKGDYYCSICCDVDEPEMEYTGECIGIDLGVKSTIVFSNGEVINNPHFEKKSERKIKHLQRKLSKANKGGSRYEKVRIALAAAHEKLGNRRSNFLHQVSHRLVRDYDIICMENLNIKGMQKNHCLAGALSSQALGTLTKMIEYKAQWHNRTVVKVGRFFPSSQLCNNCGHRYYTLKLSEREWICPVCGSVIDRDLNAAKNILDEGLRILDNEGTPRTGEAVVLRPLCLEENPTVDDRPLDLKSSGAMMREIQLVAPGVTETHRSLAGG

SEQ ID NO: 3256 - protein, 408 aa, unidentified
  REGION 1..408: note = Table 20
MIITKAYKIRLYPTKCQRVFFNKTMGACRVIYNEMLYKMLFDYNKSKKKYNYYEKYNLFTMLKNKYIWMKEVDSQALAQVYRDLENAYKNYFSHIAKLPKLKKKKEKNTYRNCRLYNNINVLFATNSYIKIPKVGLVKYRQDYDFSKLNIQKVYNITVERSKTNKYYCSICVDVEIPEYEHTGEVIGVDLGIKDLVIDSNENKYSNPKYQIKAEKKIKHLQRLYSKKTKGSKNQEKARLKLATAHEKLSNKRKDNLHKITTKLIKENDVICIENLSVKNMTKNHKLAKAIQDASFGTLISMLKYKAAWHNRKIIEIGRFYPSSKLCHCCGHRMSYMGLEIREWTCPRCKAVHDRDINAAINIKNEGLRILDKSTGEVPETYMPVENPTMDDKLAITLKSSGSMKQENI

SEQ ID NO: 3257 - protein, 390 aa, unidentified
  REGION 1..390: note = Table 20
MTMRKVAQRIPFTPSKTQAALLERCFGDRRFAYNQQVEAFNTYDKEMNPKPEYPNVTGMKNANGWLRDSPIPSNALSNAIMDFLKARSAYFRKAQYEKHRPRFASRNDNIQSFRNAMPIRRMDGNRYPLSKKLGSVRIRKRDRPRYPIKNLSSWTVKRENRTYYLVLLFNVDIQPKTQAKGSIGIDLGVKDFLTLSTGEKINYPDRLRRLEEDVKREQRKLSRRTKGSNNYRRQKAIVAKAYAKLRHYRDNFQHQLSHRLIEENQFIGMETLMVRNMTRKAQKRLDAEGRPMRNGQSRKRAMNRSILRDGWSGLVDKLSYKTEWYGRTLVQVDRFYPSSKLCHDCGHKYKELVLSEREWTCENCHSRHDRDVNAALNIRDEALRLSREKA

SEQ ID NO: 3258 - protein, 214 aa, unidentified
  REGION 1..214: note = Table 20
MMNTYDWWVAKLRAIRHSKPPEPPMRVRLHEAGHAVAGHRFGYVQQGIMLREDDTGETSQQYATGMDDDMSVRLQTEIIISMTGFAVTLEYPEYKTDALRIGGDVQAELVNAAIIHRIDPGLGSADEIMDTLWVRARLVDKLSYKAEWYGRTLVQVDRFYPSSKLCHDCGHKYKGLRLSEREWVCERCGIPHDRDVNAALNIRDEALRLSREKA

SEQ ID NO: 3259 - protein, 454 aa, unidentified
  REGION 1..454: note = Table 20
MMNKLVANAEKQHRALKLRIYPNPEQTILINKTFGCCRQIYNNRLFERNEFYQNVIKNESDKNKQKELWKKAHFSTEKEMKAKFPYMTEVSAQALCSATMFAEIAYKNFFSSIKGNRAGAKVGKPKFKSKKSNDFSYRECNPSEKALNWNERKVKVPKLGEVKFRHSGNKKGKLDFFLRGEVELKSITIRKNPANEYYAVLLSEREYCHKKKIYEGDESQAIGLDFSPADFYIDSDGSSGKDFGYVAQKQANLKKLTKLQRRLMRKQISSNNREKARVKVARMEHYIAECRNDWIEKETKRLVSSYQVIGIEDLNLKGMMKFSRNAKNYGDASWGNFTNKLLWKASLNENNCQIVKADRFFASSQICHCCGFKNPITKNLNIRSWTCPECGAEHIRDVNAAINLKMNAIKNVGQGVSEFRSVEGVEDLATLALQIGASEEAENLTGDGQNVLTL

SEQ ID NO: 3260 - protein, 447 aa, unidentified
  REGION 1..447: note = Table 20
MSEKLVTFDEIQHKVLKIRIYPNTEQTTLINKTFGSCRKLYNEHLQERNEFYIDNILPIRSKATKTEIIQVYKAFKPKTEKEWKEIYPWMKEVSSAALQQARMDCDQAFVNFFKSNNGSRKGKSGFPKFKSKHNNHQSYREVNVNNNCSVNFEERKVKLPKVGIVSFKDRKFPTWWDRKIKLCSMTIEKNCSKQYSVAILFEVQKAVHKIENRKESLGMDFSPAEMYVDSDGKSGKDFGYVAQKQAHHKQLKKLSRRLARKQKGSKNRNKARIKLARLEEHVANSRKDWIEKESLRLVKSYKKIVVEDLNLKGISKFLRNAKNMNDTSWATFVSRLQAKGQDYNCNVVKTDRYFPSSKLCSKCGWKYENLKLSERKWTCPNCGTHHIRDMNAAINLKNYVPLEERKLTPVESDKVANLAMLALQATELDEAGSTTGDSVQECAKSLA

SEQ ID NO: 3261 - protein, 364 aa, unidentified
  REGION 1..364: note = Table 20
MKNNKAFKIRLYPSNVQKELITKTIGCSRFIYNQMLNERVEVYKELKEDKETLYSYKCKTEKQYKEEFEFLKEVSSRALQQSRRDLETAFRNFYRGLKKGQTIGFPKFKSKHKNKLSYREPQLGNKAIEIKDNKIKLLKLGWVKFRGLSKNFNGKIKSVTITQFRSGKYVASILVETEMNKRERKPDNVIGVDLGLKSFITCSNGEQIVGIQQEILKIEKKIKQQQRNISRKTKGSNRRNKAKVKLNKLYDYKTNFQNHFQWHLANKLCSENQTISLEDLNVTGMKRNRKLSHSIHHINWGSFLAKLEQKAKEYGTEIYKVNRFFPSSKMCCNCGKIKDDLKLSTRIYKCECGNVIDRDLNASI

SEQ ID NO: 3262 - protein, 370 aa, unidentified
  REGION 1..370: note = Table 20
MYKSFVVRIYPDEVQESFFINQFGCCRFVFNTFLDAKKTVYSDNGEYLSFYDCSTMLTELKKSKTWLKRVDSQALIESLKNLENAFDRFFKHLNKYPRYKSKYNPVQSYKTNNINNNIRIEGKRIRLPKVGWIRFRTHQKISGKIQSVTVKQKASGKYFVSILCKDVTRHVFKINNRSCGIDLGISRFVTINTGEIIHFPQQNKIIQLDKKIQRLQRKLSKKEIGSKNYNKIKKKIALAYEKRHNILDYHFYKIAQRLTEKYHVISMETLNIKGMLKNSRLSRSIQEKSWHMFIRILEQKAYEHGRKLIHIDQWYPSSKTCNNCKYHKEDLTLNNRTWTCPHCGNRHDRDINAAKNIHHEGLKIINQIQY

SEQ ID NO: 3263 - protein, 366 aa, unidentified
  REGION 1..366: note = Table 20
MMGVVYRLYPSDSQEVLINQTFGCCRKVWNYFLDGRIFMYDQLGITYGYVECCRVLSEYKTHYTYLRDVDSTALQREVKYLDEAFKAFFDKRGGFPHYKSKKDDKKSYTSVNNGNTIRFNGDEIRLPKVGWVKAKNKLHPEGRILSATITREHTGNYYISVVYTDVTVERLPASENVIGLDVGIKNTVVMSDNTVFNQSPRIIKLQNHIIFLQKKLSRQKKDSNNYKKTKIKISKTYKRIHNIINDEYDKLSTRLIRENQVIVIESLNIEGMMKNHNLARQIQTKSWNSLFNKLQYKADRYGRTLIRIDAWYPSSKLCHNCHYENKELTLNDRTWTCPKCKTLHDRDYNAALNIKEEGLRIYNENF

SEQ ID NO: 3264 - protein, 384 aa, unidentified
  REGION 1..384: note = Table 20
MECESYMSAQYHFAVPRQEGTIGYFRSSYQKLSSFVSDLLGASARRMLKALADGETNPAALAALADRNLRATPEQLCDALGACTDLKPVYRRLLKMALEQLQFLGQQIGQLDKEMASLLSQHQDAVERLAEVPGLGVDSAQQIIAEVGPTAATFPSEKCLSSWVGACPGDDESAGINYSHRSPKGNRHMRRLLNQAASAAARTKGSIFEIVYRRSVSRLGHNQAIGAIAHRQCRLIWLILHQGVRYEERMRTDFLQKLSTQLIHKNQVIMVETLGTKNLLKNRRLARAISDAGTGEFVGMLEYKCKWPGRTLVKVARFFPSSKLCCICHQKKVDLKLQDRWTCSSCHTEHQRDENAVVNISLRRGFENLSRGTLGISLWRHGKT

SEQ ID NO: 3265 - protein, 227 aa, unidentified
  REGION 1..227: note = Table 20
MRWLVSMSGQSRCSAGGGVPDGVEVDRIPAPKSLTAAQSRLRALQRRAARQHGPYDFQTGTRRQPSRRWRTTQARIGRTHAHAAAVRRDVLHKATTALAQQHQVIVVETLNAAGMRSAGGPASVASTVPWLMPPWPRCGACSATKLVGTVPVWRKPTGIFRHRRPARVVGGESQTSRWPTESSTASTAARGSIVIWVLRSTSPDSANPTGVNRVPPGVAGGRTWSHA

SEQ ID NO: 3266 - protein, 423 aa, unidentified
  REGION 1..423: note = Table 20
MEAAWRQPALHGPGERAEGRPGRGPETGRIRLQRRAAGPAPARQGLRRLHPPREGGRGAGLSALPQRGLRVGDGLVCREGRLRLVGVPGLAKVRWHRELPARPVHAIVSRSNGKRCVTLRFKVRELRLPGEEDTRPDVGVDVGLNGIVATGDGMTVPAPKHARKAQARTQRLQRALARKERRTERRARARRNLARHHGRVAARRDFLRKLSHGLAPRHRVIAMEDLNMEALKRSMPARPVPDAAWTRFRDMPGWKRRWLRGPGRPARHLPAMQRMRARAGQTEDAWRQGARLRRLRPRPGPAQSPGRLQAPLRLSWRAAMPEHMRAIGSRQGQEGSAAIWQAAFVVQGCADAEPEELDARVCPSDRAWTQLFLRTLELRVKWLMRRCLAPMLFEDDSPQAPGRSGNRRWRETRARKARRPGPT

SEQ ID NO: 3267 - protein, 320 aa, unidentified
  REGION 1..320: note = Table 20
MNGAFRFQGREIEVKRLNGKWSAARLPKIGWVKFRDTRRLRGKTMNVTVSLAANGWHIAFACEIDHAVPQNDLPAVGIDRGVANTLTLSTGEHWWMPAGLAEIERRKRRAQRVLARRKRGSSRHAKARRRVAALQAGAARIRQDWRHKASLDIARRFATVVLEDLATRETRPLGAKGGKRVQSLRDAEQPRGNPLDRPAMIDSTGSLMERTGGDWSKTAQDLTRDLTRAGFSCNPRTKAFNCVRLGCKKRLLGQALLQWQVGVKPDRERGVTYAPSFIDYGWLLKCVPDKDLNMAEQRFYAENRSINIFPRLKAGDFQRV

SEQ ID NO: 3268 - protein, 383 aa, unidentified
  REGION 1..383: note = Table 20
MSQYYTDVIEQISSILFDAIIEREESLQELICDFDSTAAKIIQSCGLCLMSKLLNNLSHQVTQEAKTKELVIHRVKKIKYAVIFGELEVPSPYLWNKKAKSGFCPVPKSLGIEHGGRSKAVKKALTDFGIEESFGQASKRFVEHYGWEVERASVRREVEAIASTALDYVEKRLESASDEPIQQKEETVSRLLVELDGSHVRTGVVQPKPEQKDSKRRNKTRLRIAKKHNKIADTRKDFLHKLSSKIVRENQAIVLEDLNVSGMVKNRKLARAISLQGWREFRVLCEAKSDKFGRTFKVISRWEPTSQTCFDCGYRWGKLDLKVRTVTCLQCSATHDRDENAAKNIEKVGIGNCHDSKRTHRGRKTVLAADLNEASRITAPLGR

SEQ ID NO: 3269 - protein, 300 aa, unidentified
  REGION 1..300: note = Table 20
MGPAAVQIPQGSPAVVSAYPQRVQPESQRPAVRGQSRRGAGALVTRATQHAVVGHDHSGTRWPFLRQFRCRRWGLTAARGGPGGRCGCRGRSVGHDRHHRWPSGRCRQSEAFGSQAAEAAAVGAEKSRRQKGSASRDKSRRKVAVAHNKVARARRDYHHKQALALVRENQVIHVEDLNIVGMVRNRRLARAISDAGWGQFVRIIDEKADRYGRTVHTVSRWLASSKTCSDCGHRLDELPLQIRSWTCPKCRVVHDRDHNAAKTILAAGRAERRNAGGASVSPPTTREARGDEAGSTPTAA

SEQ ID NO: 3270 - protein, 240 aa, unidentified
  REGION 1..240: note = Table 20
VKTLTITKEAGKWFACFSVEISIPTEPKQDLLPPVGVDMGLIDFFYVSDGSQVSVPKHLRKKEQQLQGLQRRLSNTIKGTKQYRKILKALQKCHYRIKCRRNDFLHKKANELLNKSDTIFHEKLTIQNMIRRPKPRQDKETYEYLPNGASAKAGLNKSIADAGWGRFFQLLRYKANDLCKHVVSVPPHYTSQICSSCGKTVKKSLSTRTHRCECGFVANRDHNAALNILRIGMDTFQAST

SEQ ID NO: 3271 - protein, 373 aa, unidentified
  REGION 1..373: note = Table 20
MITIECKVYGSVQQFSRVDEAIRTVQFIRNKCLRLWMDHQDSETGIGRNELARHTAELAQSYGFVRHLNSSARQASAERTWTAISRFYQSRKANSPIRYPRFQKDNRSMEYRKSGWKLEARHSRITFTDGCGIGTLRLRGGHNLTLLQPDYINRVRLLRRADGYYLQLLVKRDAPQPLPPAHRQVGLDVGLRHFLVDSEGQAVANPRHHKRSLDRLKRKQRQLARMKKGSQNRKKAAQKLSRLYLKTSRQRKDFVVKTARCVVKSNDLIAVEQLQVRNLLKNHRLARSIQDVGWRQFMQWLSYFARKMGRTMVFVPAKHTTSLCSGCGALVPKSLRERVHRCSCGLVMDRDHNAARNILKFALHTVGHTEIQA

SEQ ID NO: 3272 - protein, 453 aa, unidentified
  REGION 1..453: note = Table 20
MFVLEAKLYGSDSQFAIIDEMIRTAGFIRNKCLRYWMDNKGVGQYDLSAYCKVLAKEFEWAKKLNSMARQASAERAWSAIKRFFDNCKKKVPGKKRCDLAPFGFGSCFKSGNPPNALHSPPAGARGSAPREGFPKFKKSRSVEYKTSGYKLSEDRQSITFKDGFQAGTFRMRGAFDLNYYNPKQIKRIRVVRKADGYYAQFCIQHNKTENIEPSRKAIGLDVGLTHFYTDSDGNTVENPRFLRKTERELKRFQKWVSRKKKGSKNRKKAIHRLGKKHLKVSRQRKDFVCKLARYVVTSNDVVVFENLRVRNMVSQRVGRVSRLEATGEPVRVKNHKLAKSISDVSWRQFFEWLEYYGKVLGKVVVPISPEYTSQECSACGEIVMKTLSQRTHICKCGCELDRDHNASLNILAKGLREISRGGQSQTASLELENAFEELSLYLPNENLVDKLSR

SEQ ID NO: 3273 - protein, 434 aa, unidentified
  REGION 1..434: note = Table 20
MLVLEFKVKGKPHQYAAIDEAIRTAQFVRNKALRYWIDNRGVNKYDLNKYCRVLAREYGFARELNSTARQASAERAWSAISRFFENCRKSVPGHKGYPKFKKNSRSVEYKTSGWKLLDPKHIVFTDKKNIGRLKLVGTWDLAFYSTEQIKRVRLVRRADGYYAQFCVSVEVRETLEPSGNTVGLDVGLKEFYTDSNGECEPNPRFYRNAEKKLKRAHRRVSKKQKGSANRKKAVNQLGRVHLKISRQREEHAKRLARCVIRSNDLVAYEDLRCDPAPSHGARERAPRERIKNLVRNHCLAKSIHDAGWYQFRKWLEYFGVKFGKITVAVNPAYTSQKCSNCGAIVQKSLSTRTHVCQCGCELDRDHNAARNILNAALSTVGHTGTSVRLRSPSAVEVNASGDLTATLAGANLSEQVESLREESPRRDSWGVSII

SEQ ID NO: 3274 - protein, 560 aa, unidentified
  VARIANT 229: note = misc_feature - Xaa can be any naturally occurring amino acid
  REGION 1..560: note = Table 20
MIVLEFKAKGKTTQYAAIDEAIRTAQFVRNKCIRFWMDNRGVGQKELYRHNTALRAEYPFVKALNSHACQVAVERSYTSIARFYDNCKKQVSGKKGYPKFKKNNRSVEYKISGWSLSETRKQITFTDKKGIGKLKLKGTWNLNYYQIEQIKRVRLVRRADGYYVQFLIKTDIKVEVKPTGKTIGLDVGLKEFYTDSNGHTEPNPRFYRTGEKRLKFYQRRVSRKKKGSXVERSYTSIARFYDNCKKQVSGKKGYPKFKKNNRSVEYKISGWSLSETRKQITFTDKKGIGKLKLKGTWNLNYYQIEQIKRVRLVRRADGYYVQFLIKTDVKVEVKPTGKTIGLDVGLKEFYTDSNGHTEPNPRFYRTGEKRLKFYQRRVSRKKKGSANRKKAINKLGRTHLNISRKREERAKRIVRCVIKSNDLVAYEDLRVKNLVKNHCLAKSINDAGWYQFRKWLEYFGVKFGRITVAVNPSYTSQNCSSCGTIVKKSLSTRTHICQCGFVLDRDWNAAINILNLALGTVGHTGTWIFNPNASGDLASTVLGVNLLQQAESLNEESSSL

SEQ ID NO: 3275 - protein, 270 aa, unidentified
  REGION 1..270: note = Table 20
MHVLEFKIRGKPWQCQAIDEAIRTTQFVRNKCLPYWMDNKGVNKYDLNKHCRVFAQEYPFAQKLNSQARQSAAERAWAAIARFFENAKKGIPGKKFCIDIEVKLNSQPTGKAMELEVGLKEFYTDSNDRSEPNPRFYNESEQRLNLNQCLAKPINDAGWYRSRKCLEYFGQKLGKVTIAVDPAFTSQQCFSCGTKVQKILSTRTHVCAGGGEMNRDWNAAINILKRVLSTQGHCGTWVVNPNASGDLTATVAGVILSEQVESSKEESPHL

SEQ ID NO: 3276 - protein, 393 aa, unidentified
  REGION 1..393: note = Table 20
MLILEVKLKGRPQQFEAIDGAIRAAQFIRNKAVEYWQNHTTAGKHDLNKYCAVLAQEFEWAQKLNSMARQASAERAWSSIARFLDSRRRKISGKRRFPRFKHNSRTVEYKSTGWKLSDDRKSITFTDGFQIGQLRLIGTYDLSYQRDLIKRVRLVRRADGYYCQFCVDVERQVNHTYNGAMAGLDMGLDDFCTTTSGERIASPAGIARSERGFRRLRRRLNRKQKKSKNRSKLVRRLNRKYLKLTRQRKDFAIKSAKALCESNDLIVYENLKIRPRSRRYRQCRSFSDDIWPVFARWLEYYARLHRIVTVALSPRFSRTLCPRCGHPQQQALSSRTHCCVQCGHRETRAAQLLAREILVRGIQQLSTAGHVETAGLEPEKSLGREAPLPGTGN

SEQ ID NO: 3277 - protein, 500 aa, unidentified
  REGION 1..500: note = Table 20
MLIYEDKLDGSKAQFAAIEEAIRTTQFIRNKCLRLWMDARGVSRNDLQRSCAVLARQFPLRSPSTLRPGKLPLIRRGLPSPASMSIASRRNQERRAILPFQHDCRSVEDKQTGWKLDPDGVHIRFTDGCGIGRLRLIGSRDIMTFPLSQIKRVRLLRRADGYSCQFAVAATRRVEHQPSGKQVGIDLGLRAFFTDSEGNTVAPPQDLRKAERRLKRLHRRLSKTQKRSRNRRKARQALSKASLKVQRQREDVARKTANALVSSHDVIAYEALQIRHLVKNCHLAKRIADAAWGRFLSWVRYDGTLHRVPVIGMEPAFTTQNCSRCGQRVKKSLRMRTHLCPGCGLLLDRDHNAALNILHKALQGTVEQTRTDEEVSSNASGQPAVRVVALRRLARIQAEGRIPALLAWGVSISIPFKEAIAFDESFDPSRVPVKGSPCEGAEVPWSPDASLRLKEEVIDLLSNLRLPLSLSPLSLHADNKGTLDPFPDKMMYSNAFWKRG

SEQ ID NO: 3278 - protein, 509 aa, unidentified
  REGION 1..509: note = Table 20
MLRAYRLELEIASERKRRFLHQHFGAARFIYNWALRLVREKGFEFFKQGKGGIGKRILYYWREERDKVAPWHHEINAHTFNGAVLDLGRDLKHHSPSQLRGRSRNRHRSAHFYGIKLQHIGRRSIKLPGSRAGEFRGGVYLKVKKGTGKLYEDIQQGRIRTIKRITVSERAGRYFASVLCEVQEPEPLPCTGRVCGLDVGISSIVTVALSDGRIIKQGNPQWLAKKLRRLRRIQRSLARCKTHFPRDPGFKSLHILRRDGEVLAVFPLMWRRQNGELVPEVGDDVRILAEGVASYALLSRAPDRLEKPYRLTVGGQGSGANIELSTMRIRQGHPVRVVHLSVDRSHTMERRRKTLARAHYRVSVAREDFWHRLSTWLVRNCDVIVVESLSIKGMLRSGRFSRHIADAAWGTFFQMLQYKCERYGRTLLRVERSYPSSKKCSRCGKIRKALSLSERTYRCDQCGLKIDRDENAALNLMKLGLAHLTSPTARLAGSDAGGGTIAGGAAACT

SEQ ID NO: 3279 - protein, 483 aa, unidentified
  REGION 1..483: note = Table 20
MYLHENKENFQEMIELVSTDTGRAAAVIEKDYYVTLILRLLSEQLSNVVFKGGTSLSKGYHAINRFSEDIDITFDEHIGEARRKKLKNQILKGISEELCMPISNWESTQSDRDYNAYYFSYESVWNLDDDRMLSSVKLETALGSYAFPTEKIKIGNYIGEYFRKRGREDLAEKFRLDEFEMKVQALERTYIDKIFALCDYYIQNKSKRYLRHLYDIYKLTQHISFDANFEKLYYEIREHRKTMKICPSAGEGVDVTKIIREFCDADFYREDYETITSYFSADYFEPEPRPNAGGTIGIDVGIKAFYSDSNGNTVSNPRYLERSMRKLIREQRRLSRKQKDSHNRGKQRLRVARVHEKIANQRNDFLQKQSTMLVRENQTICIEDLNVKGMIRNHKLAKSIASVSWAKFFEMLEYKASWYGNELHRVPTMYPSSQTCSSCGYRNPRIKNLSIRIWECQKCHAVHDRDTSASINILKKALQMQSA

SEQ ID NO: 3280 - protein, 359 aa, unidentified
  REGION 1..359: note = Table 20
MYRYISYRIYPSKKQREAIQKTLRCSDLVWNLALRQIKRNKEKGIPLPNERQMVAKIQDWIEDYPDILDQNPYVLTSIISDFYKALSTKKALRFRKGRSAYRLLSGPDGALVTFDFIEIPGLGYVRYRQGQRPDGFGKRIIVKKTHDNKYYAMVLLSIANPNHKNNGGVIGIDLGIKDFLVTSEGNRIAPPNFMERRQRDIRLLNHQLDRRNKRSKNYRKTVHSIQKLHEKIKRKRKDFLIKTALGIVKDNAVVCIESLDIKDINRVHSIARREVDLAWGEFVDWLQKKAVEYGTRIVRVGKYFPSSQLCSNCGRKNPMLRDYTIKTWKCPSCGVILDRDINAAINIRNEGIRLLETIR

SEQ ID NO: 3281 - protein, 379 aa, unidentified
  REGION 1..379: note = Table 20
MLKTYRFRIYPTAEQIKQLEQHFRETRMIYNRLVERSNTEQPFKRESSTSVIKELRQDHLFLQNTPSVSYKHVLNNFHRAHQRCILLNRKLKYKSAHGRASFSLINRDQAILVDNKAVSIKGIGRLRAKMTRLIKGNILLATIVKTGSERYYMSILTKQPENKVVPLLQKEKLRCIGLDMGITHFLVRSDGQRIENPRYYQQNLQRLRRLQKDLARKQRGSANYRKQQIKIARFHESLVNRRNAFLHRESSKIVQENDIIVVEKLGIQDLLGDRRLSLQISDASWYRFLEMLAYKSQWYGKRMIQIDRYAPTTRTCCRCRSLTAKLPLQTREWHCPQCDTFHDRDINAAINIMIEGAKIYMKEHPQIQQKLIPVLSDRR

SEQ ID NO: 3282 - protein, 415 aa, unidentified
  REGION 1..415: note = Table 20
MYITYRYRFYPSKWQAEYIDQKMEMARKTYNQLIHWYLQQTTDVQNSMRRAHSSVSGSFSDDEDASIADSSNEVPIIRNVNQHLIDHFLTEDTRCSLVDRTIVLHAIKTFDRNRIATQEHQGIMRFKSIDRKQSCTIYARELSLSIDGPKLHTTLLGTCSITMTRKPIGRLLLATFSRATSGKYYISLLMKKRDTQKNIRKTLSKQSIRIVGIDVGLSHYLTLSSGFHVKNPRFMDRQLKAIKRDHHRFSRAQPGSRNQRKKKRRLGVRYEHLNNQRKSFLHRLSTQLIKDYDVICIETLDIEGMKRQRRRSRQISDASWGQFIEMLTYKAKWNGKVIMKVPHHLPSSKQCCRCRYIKRDLTLSDRHWRCPQCQTEHDRDTNAAINVLIAGTKQLLRTYPSTDPKALKPALSDQR

SEQ ID NO: 3283 - protein, 329 aa, unidentified
  REGION 1..329: note = Table 20
FLQQEKSHDLTDRSILVSVLRHFAQNRKMAVQNGRNLHFKSCKQHKQTIRFLVCNQSLAIGHNTIRMTLLGQVKVSITRKPVGRLIYLTICETVAGRYYISLLAKKADSKKSIYKTLQKRKISIVGIDVGITHYLTLSDGSTYQNPEFFSSNLTSIKRCHRQLSRKNEASRNRAKARLRLARKHAQIQNRRNGFLHEVSTEIVKKYDVIAIENLSIHQLMLQNHRARKIADASWHQFMWMLSYKAKKQGKAVIVVPRYLPSSKQCCRCHTINHALTLQDRHWVCSVCQTQHDRDTNAAINIMVAATRILLKEWPLINRASLYPVLSEKR

SEQ ID NO: 3284 - protein, 550 aa, unidentified
  REGION 1..550: note = Table 20
MRETEKRRISSYSMKMQLYPSSEQKQKIDNIFRALHLAYNMTFHEVFEKNPNVCTKPNSSGATWPDYKKMAKPVWRKYLISKNPIVKEAPSVSLSNASGLFHLDAQRAWKTGMHNIPIEASNRKDFNFYNAERPRRSFFMQLTANQLQPSSENKKVAWITLSKKIGKVKARGFNNKLWFGHKGDLTYAEARSQKIWKERLSARISKDTCGDYYISITFFEGKKKERPLFLEAPIAEKTTSIGIDVGIKDIAILSTGQKIENKHFKKEKASTLAKLNHQLSKRWGPANMAYRDYNKARRNDIQNNINATTLPLAPPSKRYLATKHKKTLIERKIARRRDTYYHQQTANIVRQSNMIALETLRVSNMLRNHKLASALSDAAMSNFMEKLAYKAERSGIEIRRIGIFEATSQLCSNCGEQYPAAKNLSVREWTCPTCKTHHDRDINAAKNILSIALQNQTTTDPPLHDNENKKQKTTLPKARKSKDILIFPDRPDIVVVFSKDLTSFRNPRYIIKNKKTNIILDDAQGVGYKSASNAKNSYKAKIKYAINQNP

SEQ ID NO: 3285 - protein, 466 aa, unidentified
  REGION 1..466: note = Table 20
MKVNNYSMKCRLYPNKEQAKIIDDQIYGVQLYLNKCMYNLFNYFDGTTEKKDKDGKTVHWINSKTFGMFTSAAYKANCIAADSRIGLAIPASLTTEIGAIKTDFKKRLLMAETVWEKAERIKAKSEGKKYKKQKKIVTDIKRATIKYPVESIIPNYYTKEKSRKSFTYATCLSSVSKTGNDNVFFIQLVKPRAEKRVFQPVKVRGWNKNIRFGENCSKTFLEWVLENKTKKITITVSKDHENNYWIIFKIPECYVKTKEKAGNQIGIDVGIKDLVITSNGVKYPNKKYKYNKQNELKRIDKRLSRRLGWRNIKFREGYKAGRFEKPSKRYLKTQMLSAKINRKIANKRNLWNNIVSKDIVINNDYIAVETLNISGMFRNKHLSKALEDASMGDVLAKIKYKSIWHDRIVIAIDRWSPSSKRCNCCGYIKRDLKLRTREWICPVCRTQHDRDINAARNILYYSMNLN

SEQ ID NO: 3286 - protein, 488 aa, unidentified
  REGION 1..488: note = Table 20
MSTDKKYYKISQYTMKCRLYPNKTVAKGFDKAIQAIHCYHNCLLYDIFNGNIESTAKPYKPKKESKPEKKKNESDFDYRQRLYSYEQKQKYKEGDIIHFPNLNYAFSAEYKNKLIEEHPVIANAPASAITAKIGLMSDVKKSLGKLPIEFQKPKYYSKKKPRQSFSYQDVLGKLVETDNKNVLFIKLPEKFGGTRSNPAKCKIRGWNKKIRFDRYGEINFIDYFKSNPNKRITIKIEKDNCGDYWIVFSLTNVYKSMANPQNTFGGIDVGIKDIAILSDNTKFENRKFKDEEKQHIKFLNRRLSRRQGWSNEEFRDGYKQNKDMIVSKTYQRTQLKLSKLHRKIARKRENYNHNITTKIINTYSFIGIETLNVTGMFRNRHLSNALSDAAMGEILSMLKYKAEWYDRIIQPISQWSPSSKRCSCCGYIRPKLGLHIREWQCPKCGTFHDRDVNAAINILYYALLIYYGEEKGKEIFEKLNNNFQLLCA

SEQ ID NO: 3287 - protein, 455 aa, unidentified
  REGION 1..455: note = Table 20
MHYDEINNYAMKCRLYPTKSQKKAIDDALMAVRVYHNCLIYDMWNNGINVTEKKKKCKGGECTEETVHFPDLKTAFEKEYKAKLTEEHPIINACPAAAITHNVGLKGDIAKELGKNPIEYHKPKYYNDLHPRTSYSYDEQLTKVKIGDNPNVFRIDLTRIGEVKVRGWNKKLRFDDEKTDFLTWAKTHRQERIGVVVSRDKVGDYFIVFKIKKCLKPFAEPSEKKVGIDVGISDIAVCSDGTVFENKKFKKDEKRHQRLINRKMSRRWGPSNEVYREALKRNKAERKKIMNDPELNGKVEPPPPLKPSKGYLREKQRHAKLNRKISRKRDAWNHEISRRIVEENGLIAVETLNITGMLRNRHLSYALSDAAFGTLLLYIKYKSDWHNRTIQSIDRWTPSSKRCSECGYTYNSDDEYRLKPWSLSIRTWKCPVCGTVHDRDINAAKNILFFAEQSL

SEQ ID NO: 3288 - protein, 460 aa, unidentified
  REGION 1..460: note = Table 20
MKAKDNLRLDLVSAYTMKARLYLNKAQKEIVDRILTGVRLYYNCTMYAMLNDMECTREVQSKTDPDQTVHYPDFKKAQNATWKKKLCDEHPIIGEVPAGALMGNNGCVGADLTKALGKRSVEYINKQIAYAKSVKANKSLSREEKKKKLEGVQIPHYYSQNHPRSSYTYQETCSKVQPTGNINVFKISLNKLGLCKVRGWNRNVWFDADGMKNFLDFCSENKRQTITVTISKDLCGDYYICFKLLNVYVPIKDIQGDAVGVDVGLKHIAILSDGTKYERRRFKNKEEKYKLKIINRKLSRRQGWANEEFREARKTDKELQVSNRYLKIKKKHEKLERKLKRKRDFYNHCVTHEIIEQHDALAVESLDIKGMQENKYLTYSLADAALGDVLSKLKYKAKWHKKELRAVEKKYPSSQICSECGYVNSKLTLNVRKWTCPNCGTVHDRDINAAKNLLSHAYNI

SEQ ID NO: 3289 - protein, 439 aa, unidentified
  REGION 1..439: note = Table 20
MWYKIPNYTMKCRIYPSTAQQEAIDRILHGIRVAYNVTMYEMITNFKNTKEAKDKKEDKIIHFPQFSSMIKKEWLDYLRNNYPAVKEVPAGCLSSSVYGIFAGDAKKAWESMGKKPVEFYKPFFYSAKKARTSYSYQETFSKFSFSEDNKNVLYINLNKLGKVKIRGWNQKIRFDEKCSKDFVDFVKESSGKTQFGLTISKNNIGEYFICFKLNNVYKFIKESDFNKEELGIDVGLKDIAICSNGGKYENKHFAKKEKRHKKILNRQCSRRWGWSNEEFRKAHKDNLEITPSKRYEKAMLSMKKLDNKIARKRDLYNHETTLKIVSSATSLAIESLNVKGMMANHRLAYALSDAAMYDVLNKLSYKSLWYDRTITTIGQFDPSSQRCNNCGYQNPLVKKLSIREWVCPCCGSHHDRDINAAKNILWYAKQKNNNTLTNK

SEQ ID NO: 3290 - protein, 352 aa, unidentified
  REGION 1..352: note = Table 20
MYLGMKVRMYPNKLQAGVISQILSSSRKYYNQVLDSYSKKGERTKNQELLSQEADFPDVSIPRFLESSARQAARDKNQRHKGENDSFQSFSFLCRNHSLVLSRNPERASIPFLGEVPVRGLRSLPGSLCSATIRKEQNDRFFLSMRIASLKDKKLVPNRKAVGIDLGITDFAVLSNGERIPNMRFYEQEEEAIASLQKELKKHHYGSRRYLKIRNRLARKEERIASRRLDFLHKATSAIVEEYQYIFAESLPVQEMEKERKYAKSISHAGWAEFYRQLEYKSKMKGRIFHQIPRHFPSSQICHSCGALNPESKDTRNREIHCHGCNNTYDRDLNAALNIRDEGLKEIGVSLI

SEQ ID NO: 3291 - protein, 389 aa, unidentified
  REGION 1..389: note = Table 20
MINQGMKLRLYPTPQQQEKIRKTLIANQLVYNDTLAYLGKRKAAKLPAPTLTELKNYFLDFILVKETALRDFAPHLLFKSLYRAYDAFLAQKGSGPIRPEKPKDFRQKFTVDYSPGEVKVSQAKAKIYLPEFGILEAHGLYSFSGKITAVTLSLINHSEFFVSLRIIGNIPPLWPPGTKELGLDLGISSLITTSDGIKYPFPRFNLADDKRVEALIKVLRTKKKGSKNYQKVCHKIGQIRLRMENRMKHYIDTITTALVKQSRLIAIETLDIRGMIDNPKSAWHINQACWGEIIRQLGYKCRWHQRKLISIQRHYPSSQICSTCGYRNNAVRDPNIRIVTCPNCKTTYDRDVNAAINILRKAKQIADYKDRGILLDSPPEEFHKSHTEF

SEQ ID NO: 3292 - protein, 381 aa, unidentified
  REGION 1..381: note = Table 20
MYKGMKAQLYPTLDQKEIIDDYLQLFAEVFNLALTKAGEAKEKGKSLSFGQIYHQLMKEKKAEYSQRYPIYSDECLFLASSYALKQFNYSHAKDYHALFFSKDSHKTFFLVPLTAPYEDKGTLALKMNRTKKKAFLPLKGIGIIETRGIPPFSGRYISARITKTQLGRYYLSVQYETKDPSLPIEGDGHPIGIDVGLNEIVVTSDGEKVLNPRFFQVNEARLNRLNRILAHCQKGSANYRKVHLKIAKIYEHLTNQRKDFINKLTLDLVKKHKILVVETFAPVELKADHHLVRSSVEACLGEFFVQLKSKAKWYHRQLIRVDKYYPSTQICSNCGYRNHEAKDLGVRQWVCPNCHQSHDRDINAAKNILEEGLRMLSAPSV

SEQ ID NO: 3293 - protein, 369 aa, unidentified
  REGION 1..369: note = Table 20
MKITKTFSYKLKPTKDQSNDLQKTLAATTFCYNLFLHYNKLSLEKIKKKLDLKEMLKQLPSVIKKYQQLKGVSTSYLNSTVVDLFFSLKPVYRVDSLPSFKKQGNRIILLRDFLLDEANQYLKLPAIGSIAYIQTRHIKGVVKALHLVYKFNGWYVDVVCEQHIQPKNPQTKPRFLGIDVGLNDFAILSNGMKIDNPRFYRTLEDKLKTAQKSLSRKQRHSSNWHKQLKKVQSIHKHIYHARMNFLHQLTTYLTDEFDVLAIEKLPIQEMKRNRKFAKSIQDASWGTFVKLLKYKATEKGKTIVEVDRYFPSTKTCSRCGHKEIIPLHLRTFTCTRCHLKIHRDYNAALNLEQKAVHHAFVHNLSDCRG

SEQ ID NO: 3294 - protein, 364 aa, unidentified
  REGION 1..364: note = Table 20
MSVRTYKFVLHPSERQRALLDTLQLFCSYVSNAYMYITTKYSKSNDKNMKNSEVNDLLNAIKTKYSSFSSLSTDIVHAVGKEVIKAPHQHTPITFIPLKKTSIKNEFVSIGYHTFIPYKQTRPLPESPNSISNVQIKKQGQNWFVYCYIYQPTTSVNPRNLHKFVGIDVGLKEFAILSNGTRIPNPRYYRTMEHKIKMEQQKLNNKIKNSKRWSAQKERLGRLHQKIHNQRKDFIHKTANDIIKNFDVIGVESLSIQKMNRNRKFSKSILDASWGDFISTLKYKAEDQGKALVEVDRFYPSSQLCSVCGSKQIMPLKLRLFKCNTCSAIIERDYNASLNIEREAKNKFLEQYVFGEQNLNDMGG

SEQ ID NO: 3295 - protein, 311 aa, unidentified
  REGION 1..311: note = Table 20
MDPEKPLSISQLRSITTPLFEKYSFTPLFTEILFPQILNNLQKKSSYFETIFPFTFKQFTYNKNTNQISLPFCKNVQLSHYRKLPSKIYKVELYFKNKKWYINLLVSKKEPKKRTEHLKTIGVDVGLKSFAFLSNGKSIENPRFYDEMKEKLSIEQHKLSKKQKGSKKWLEQKKKVNALYAKLHRQRLDFLHKFTHYLTENFDVIGIENIHIRDLQQKRHLRNSLSDVSWGEFMEMLAYKCEEKGKHLVFVERFFPSSQICSKCGSRKWMPVHIRTYSCSNCKVEQDRDFNASLNIENRAKQIYLETIYIA

SEQ ID NO: 3296 - protein, 353 aa, unidentified
  REGION 1..353: note = Table 20
MKHFRTYQFRLYPTTQQLKSLQESWSLGTFIYKAFDKFHNEVSLRQSDTQLLLNRLSHHYPILHTVSRIFLEQAATQTWDKKHKSFQGYTFKDYRLHNARLYIKGMNPIKIVQSRAMPSKPHKVTLVQKDGKWYASFLVSLLNEVNKPETYRIVGVDMGLKDFITLSNGKHISHPKFWKQFEDKVKVEHQKLARKQRGSNEWLKQQGKLRRVYRKLSRVRHDFLHQVSRHLVSSFDVICFESISLSSLNKKKHLRKSLQDTAWSTFIQYVCYKAEAEGKKVIFAERFFPSTKRCSHCSKVRDISLSERVYTCECGFVCDRDENAAKNLEWYGKQALITSTKKRGFPYRFEVNI

SEQ ID NO: 3297 - protein, 163 aa, unidentified
  REGION 1..163: note = Table 20
MINTLIEHQRLSITFAETLQRLSEDDWRRKIAPDKWSIAEIMGHFRFWDAFLLTKRVPFFFTTQQFEPSPNVDLINEQSAAYARVTEKDKVLAEFIIHRQQIVEIDRFFPSSQLCHACGHRDGKKPLAIRVWTCSACGTTLDRDINASKNILIEGLRLLKQQP

SEQ ID NO: 3298 - protein, 217 aa, unidentified
  REGION 1..217: note = Table 20
MKKQQNVVVNTSVLIVIFVALFAINQVTKNKDEANETVTEVPSTMGQPVMGVLNATVSIVEFGDYKCPSCKAWGEQVWPQLKKEYVDSGKTSFSYVNVLFHGEESKLGAQASEAILNSDPEDFWNFHKALFDEQPEDNHDGLWITEEKLLEVAKASVPALDEEFSHSQLCSCCGYKHKEVKDLKLREWDCPACGAHHDRDINASLNILAEGKRLLAV

SEQ ID NO: 3299 - protein, 191 aa, unidentified
  REGION 1..191: note = Table 20
MQPHPDHRVVGGDGQQPGDQGHAEPVGDQRAGAPRQRMTGRDQQVLVVLDQDPLLEAAVVGRRVGGIGYEDRDVGATGIVGSTPPFTAEVTPTPPRRRLVRIGRFEPTSRVCSVCGVKDGPQPLHVREWACSGCGAVLDRDINAAGNVATAAGLAASARGAQVRPEPVRAQRDEAGTRRSGRPAAVGIPGS

SEQ ID NO: 3300 - protein, 161 aa, unidentified
  REGION 1..161: note = Table 20
MDPTDRCHASFVVEVSDQPLPPMGTEVGIDLGLEPFAVLPDGRKIGNPRGAEGAPQAPPSPAGTRPPPEGVRSRAQSVRTVDRWFPSTRLCSDCQALGDATPLDVREWACPCGAIHDRDVNAAINILTAGRADRSTPVAAPPDSGRPEQGPVKQEPAGSAG

SEQ ID NO: 3301 - protein, 364 aa, unidentified
  REGION 1..364: note = Table 20
MHTEKIVRSYQYRVIPNSATKEFLLKCFKDYRRFYNICLYWHNQHHMDYDGYNMFHRLFNYCLKQLETQDFIKTPRCVFQSAFDRLRKASKTHDVKTRKHDDDRKLTFGKRQKEYKIRGKYLYLTGFPRLKLRWSRPLPEGAHIHNVILSKTNNKEFYVSFVISFLSKKDSAPTEKKVGIDMSLQHLCVLSEGIKLDYIHPFEKISEKLAKKQRELQHREKGSKNFQKTKACLSRYHLNAKRMRDDYIEKLTTKLAKEYQMIAIEDLDVKGIAKEYGKGVNDDSFYQIKYRLNEKMIEYGHQLVVIDRYYPSSQICHNCGYRYRETKDIHIREWTCPHCGETHDRDVNAAKNILKEGERIVSYR

SEQ ID NO: 3302 - protein, 491 aa, unidentified
  REGION 1..491: note = Table 20
MSNNQFISKYAIQIILIMAIICMMLIFYIIYDKLNFKIKLQKIAYTDNLTGANTIDKFVIDANKILCKNTQVKYALLYIDIDKFKYINDLFGYEVGNEILRNLTKIIKSNIFEEEMFARISADNFIIIMKYIEEEDITKRLKTIFEELDLFNNNQEEKYKLVLSCGIYFILPEDRDINSIIDRANIPHKMAKGGHKSSYAFYDNKIHDQEIKEKEMENTMFSSLENKEFIIYLQPKIDLNTGEIQGSEALVRWKRPDKGLIPPNEFIPFFERNGFVINLDLYVLEEVCIYLRKWIDAGINPVTVSVNVSRIHLYCNNFIENPKYLKKSLNKLAKLQRELSRKTIGSLNRNKARLKVARLQEHIANQRNDFLQKLSTKLIKENDIICIEDLQVKNMIRNRKLSRLISDVSWSEFIRQLEYKANWHGRQIVKVGKFFASSQICNKCGYKNEEVKDLNIREWICPSCNEIHDRDINASINILKEGLRLITIQNK

SEQ ID NO: 3303 - protein, 196 aa, unidentified
  REGION 1..196: note = Table 20
NTNNHIGLDLGIKEFCISSCGEFIENPKYLKKSLNKLAKLQRELSRKTIGSLNRNKARLKVARLQEHIANQRKDFLQKLSTKLIKENDIICIEDLQVKNMIKNHKLSRLISDVSWSEFIRQLEYKANWYGRQIVKVGKFFASSQICNKCGYKNEEVKDLNIREWICPSCNETHDRDINASINILKEGLRLITIQNK

SEQ ID NO: 3304 - protein, 307 aa, unidentified
  REGION 1..307: note = Table 20
  REGION 224..228: note = misc_feature - Xaa can be any naturally occurring amino acid
MPENNNQLLEEITLLLNEGKVAINKAENQNLILILGGTGCGKSTAINYLAGCVMMEVEDEDTGISYIDCLDPVAEIGSGAVSQTLYPNIVNMRKPIEGMDAKLCDTAGFSDNRGVAHDISAAVSLGEVFKNSASICAVIVLIPEADILDSRLTKVLDLFQQLNMCLHKENFKGSITFFISKSFLERTEKQIYNVIKRKYEQLCENLDSNIEEKAWLFEELLKDXXXXXFVRQLEYKANWYGRKIVKVGKFFASSQICNKCGYKNEEVKDLNIREWICPSCNETHDRDINASINILKEGLRLITIQNK

SEQ ID NO: 3305 - protein, 201 aa, unidentified
  VARIANT 137: note = misc_feature - Xaa can be any naturally occurring amino acid
  REGION 1..201: note = Table 20
MIVNKELIIDYLKSNQENIINDIRSLVEIPSIRDESTTDINQPFGIEIRNAFDKLIQIAKDKDFVVKDFDGYAIHIEYGEGEEVVGVLNHIDVVPIYNKELWKSKPFKVCQKDNYLYGRGVNDNKGPLIGILYALLXIVKVGKFFASSQICNKCGYKNEEVKDLNIREWICPSCNETHDRDINASINILKEGLRLITIQNK

SEQ ID NO: 3306 - protein, 793 aa, unidentified
  VARIANT 755: note = misc_feature - Xaa can be any naturally occurring amino acid
  REGION 1..793: note = Table 20
MKLNYIVKKYIMGNKKNTLLIIVSIVISTALFLIMNIISEDATNLMINQAKNEFTLKHAQYINPKDEEIKYIENNTSIDKVGKSMLLGISDIGKGQTLQILSQDKVAEELNDIYTLEKGKLPVAENEIAIDSWYIKQKKIKNPIGKRITLDYRRQGIDQEDLYTGEKEFKITGILNSNPILKAQGTSIGLISNDCAIKNIPTKNKYDQVMFTFKKEKNIQRQSQKLIKNGNLNENNIYFNNELLIAISDSMNLKIPYIIVNIVLALATILLIYNIFYILVSNRIKDFGIFRALGFNPNDIFKIMILEVSIYSIISISIGLILGGIIASLSREYVIGVIYNVNYINSIKNQNYINTYIISILLSLGTIIISVSKPLMLSVKTDPMICIRRNNEKVDIKQNSFINKFMIKLFKDYGNIASKNIQRNKKRTNLSIASMVIIFSLMATIYTKSTSNFLSDGVLKYWIQGDYLLHNIDISTIRSNNKGYDKNVLQEIKAIDGVTKVNSYRHKWFNIKIDDKSINKNSDYWKKNKDNIEARSEVKDGIKVYNNSFEFLGIEDTDILEDFLINGKENIDKFSKQPYLYITKKSSDSLNIKKGDRIKVYFDIIDSKTNNFTKTISQEFIVCGIITTLPVTSQVGAEFGGVISTNQFNKFTGISSYERFDIWTSKLANDKYVESELNKITEKTNKGILIPYKAETAEYEKIDNQKTLIMVLVTGIIVILSLFNCCNTIVTSINSRSREFALFRGIGISKHEINXLNIREWICPSCNETHDRDINASINILKEGLRLITIQNK

SEQ ID NO: 3307 - protein, 344 aa, unidentified
  REGION 1..344: note = Table 20
  VARIANT 304: note = misc_feature - Xaa can be any naturally occurring amino acid
MIFSSLIFLFLFFPVTLICYYLANPKYKNVMLLLASIAFYAWGEPKYIFLMILSIIVNYIFGIKVSGSKNKKMWVVLSVIYNISILAVFKYSNFFIDNINFLFNTDITIPEVKLPLGISFFTFQIMSYVIDVYRNDAKVQRKLANLALYISLFPQLVAGPIVRYQTVADSIEYREHNWDKFTQGVNRFVVGLGKKVILANQLGVIADGVFNKSAGDLSRLEVWLGIVCYTLQIFYDFSGYSDMAIGLGKMFGFEFLENFNYPYISQTVSEFWRRWHISLGTWFKDYVYFPLGGSRVSKAKLYRXKDLNIREWICPSCNETHDRDINASINILKEGLRLITIQNK

SEQ ID NO: 3308 - protein, 435 aa, unidentified
  REGION 1..435: note = Table 20
MKEKVNVTGVPETMVQTLYARAKETKKQNAKIKDEIAVELVEKLDYDFSIADKDNAMNYGVIARTIVLDWMVEQYLKKHENTVVVNIACGLDTRCYRMKEKYLRWYNVDLPETMKIRSQFLTETDPVYQIAKSAMDDSYIDDIDYHGKNILVIIEGLTMYLYEKDIRKMFSIIDKSFQKVTVMVETMSPFVVKHMKEKSIEGSNAKFTWGVKNGKELQRIIPAFSVRQEVSLVEGMKELMPVYCVIGKIPAVRNISNKIIVSAGKKYENPKIIRKYEKKLIKLQRQLAHKEKRSQNYYKTKKKIALCHKKITNTRKDYLHKMSLEIISENQVIVSEDLQIKNMVKNHHLAKSISDVSWYELTRQLEYKAKWNGRKYIKINTFYASSQLCSACGYQNTETKNLSVREWICPVCGTNHDRDINAAKNILEEGLRQIA

SEQ ID NO: 3309 - protein, 393 aa, unidentified
  REGION 1..393: note = Table 20
MGKRKMADQWKSHMFNKYQDMVLIKGEDRTGEIQFMSFDKKYHQHVVYFVNGDIGYYELNDIKKLKDPMRRNVENKNVYIGETKIKDISFLLDFGNSKRIIYKNGDYQTEDFRSLEEVDKYNKIDKKAFKPYLYHLNPDKIQKEIIDNKIDKSREKEKSGEKVYLYNPDKLIGNIIKYKGKVAYADILDVGDVEIKMSDYPTGNCHEIHVKKTSNVYQITFYCYKRVVGIDLGKREIICSSGKRYNLPYINLKNTKKFWEIKKAWEESVVMQLLLEYDILFLEYLERNNKTDPGFEDMIGFPNILKDKAKLFNQGNPQNAYEKEVYILESKYPSTQICHICGYQNEDLAVNLQKRNWMCPYCGTKHDRDINAAINILRHGMEEKILNNKMEEN

SEQ ID NO: 3310 - protein, 431 aa, unidentified
  REGION 1..431: note = Table 20
MKKKDPSWAYLFDGLNAWAIQETVKRHDDGFNRFFKYLRRKAKDPKTLPKESPPQKHKIHSEGSYTLHAGNGYKLIDGGIATGLMWNSYGRKKDIRTYRFFGNREILGNVRNVIFKRDRCGDIWCIVTTDHNQFRHIEKTGKVGGFDYSQEHFFIGDDGRFWNFDYDMEQDQKELASLRRKLDRTQSGSKNRRRIRLEIARLCRRMTNKKRTLQYELAWRMCKEYDVLCFEHNDFDDMKRVGRVVNGHKVSKKQRQNLWELSPSTFLVILKDVAKKAGKTVFFADRHFASSQICSNCGHQNKALKNLKVRKWKCLQCGMRLDRDINAAKNLVKEFEIKLGGVPSLETETKEEVAKPSVWERIRKSASVKRAAGSGEKSPCPQSRQVAQPENGCGTAEKHPELYTDACKVQSEKRGEENQGCGLQRVFKPPD

SEQ ID NO: 3311 - protein, 399 aa, unidentified
  REGION 1..399: note = Table 20
MPNKEQTQIIRENAEAARRVYNHFLKEWQRSRETAGLGLSFHYFTRQLQLIYRQKFENRNIDYGLLQNQYYELEKIFQKASRNRKAVIREKTPGYACSLHYGKNYEKFLVSLDNDHISLPIIGKMKYVNSRQREGRLAEIIVTGRPDGKFYLSLTCYATATPLEPTGKAIGLDLGLKDLVVMSDGRKFRNPCYGRVLRKKLSRERRRLSQLENNNIDHYEETSKDGKLIRTAVYRRPLTECRNYQKQRIKAADVEERVADSRRDFEQKLSTYLIRNYDVICVEDLPIGVLKQKRNVAYALADASWYHFISMLEYKANWYGRKVIKVNRYFPSSQLCSRCGYRNRLIKNLDYREWVCPQCGMKHDRDVNAARNILREGLRSCRYETLPSGQAGSSKGRLS

SEQ ID NO: 3312 - protein, 317 aa, unidentified
  REGION 1..317: note = Table 20
MTNGNIRIDFQRKRIKLPKLSWILYADDRIFTQNIKHVTVSKTKKGKYYASLTLEKQPDSSLLMHLFFSKIAAFDMSARDFVVNHLVKMENPRFYRAEEKRIVKAQRLLSRKQEGSKNYEKARRKVAKIHEKVYNRKKDWTHKLTHTLADEYHAIILEDLNIKGMQKFHSGLSKSVTLDFSWHQFVTYLTYKMKWNGHHVIKVDRFHPSSQLCSACGEKTNHLTLDMREWTCSHCETHHDRDVNASLNLLYQGLLALVSENPLMLIHDDTPTVGTTGSHAFGEEVRPISILTNLYRHTSRNKEFRLAKDESPPFIVE

SEQ ID NO: 3313 - protein, 244 aa, unidentified
  REGION 1..244: note = Table 20
ILRGKAIRLEFCPQSGFFPLSGFDMSLENFTVDHEGNTPGFTRNTRKYETQLAQAQRRLSKKKKGSQNWYKAKHNVAIVHETIDNSRADFNRKLATELVTKYDAICIETLSLKGMSRALRLGKSVHDLGYAEFVSKLKQKAEETGTHIIQVDQWFASSKLCNNCGYKNSALQLHERTWTCPHCNAEHSRDENAGKNLRNVGLHILGLGEPSKLVESVLDVETLVPMQYSVKQEAHRPLLMGKSP

SEQ ID NO: 3314 - protein, 382 aa, unidentified
  REGION 1..382: note = Table 20
MKPTTYTYKLYPSRRNKHLHQLLEAARQTYNHCIKLYRRYYRLYHEKLPKQKLQCHLTKQQKLLHYAYLRQLPSSIRNAIPYKIEKAYQSYFALLGKNKRAAPPCCCSQEAFTTITLYQSGWKLDEEHHRIRIGKTWYKYFRDRALPSKPKSVTLKRSPLGDFYLYFTCQIPKQFIPFRKRKVIGLDYSMQDFLCGSDGNRISEPQFLRESLAAIQKAADSLAHKHSGSNNYQRAKKDLLRKYEKLKNQRSDFQWKLARKLVQDYTVVAIESLDSQKLQKKFGHRIADYALADFIKKLKYKAEETNTLIFEHHPYFASSQTCSNCGHRNPQVKNMQVKTWICPHCGAEHDRDTNAAINLAQHAMEILLRGGKQRMRTTSEQK

SEQ ID NO: 3315 - protein, 384 aa, unidentified
  REGION 1..384: note = Table 20
MARQAFKYKLYHADRNRRLDRQRRIAGQIWNHCIALHKRYYRRYRKHLNQKRLKSRIAYLRNHLRPEWKNLGSQAVQDVIERIERGYELFFKAYRLRKEKKSKRVVRPPSFRKSVKYRSFTLKQAGWKLISPGKVKVGGCVYRFHQSRAIEGKVKTVTIGRDSVGDFWITFSVETEDAAPIKAATGRTAGFDFGLKRFLTGSDETTVEMPEPLKSELKRVKKANQRLSRKLKKSGGRKKARLSLARLHRQIADRRREFHHQTARALSRKYDVICIEDLNLTGMKSLWGRKASDLGFAQFVDILAHHCRKNGSRLVKIDRFFPSSKTCSVCGHVHRELSLRDRTWECPSCGSHHDRDKNAAINIEREGLRLIAHQAGHRLEGEAA

SEQ ID NO: 3316 - protein, 385 aa, unidentified
  REGION 1..385: note = Table 20
MVITRTYKYKLYRSKQNKHLHQQIDVAGIIYNHCIALHRRYYRLTGKHLNANQLMKHITKLKKLDKYAFWNLVGSQAIQDIVQRIDRAYKLFFRNLKAGIKTAPPQFKKVKKYTSFTLKQAGWKLLGGNRIRIQGRIYKFSKSREIPATVKTVTIKRDSLGDCYLYFVVQEEIELPNRQGHISAGFDFGLKTFLTASDGSAIDSPLFLKQSLDQLKQAQCELSRKVKFSRGWHKAKAKVARIHWKIVNQRRDWFFKLAHTLTDRYDCLFFEDLTMKGMQALWGRKIGDLARSEFMAILEYVAQCKGKLVGYVDRFFPSSKTCSACGHLYQDLDLSERRWICVACGVIHDRDQNAALNIEREGASSHRLGDVRPGVTAVTLRALAA

SEQ ID NO: 3317 - protein, 377 aa, unidentified
  REGION 1..377: note = Table 20
MRKTYKYRLYTCERNKHLVESIELASVVWNHFVALTRRYYEIYGEYPGYYALKKHLTKLKQRDKGHWYDLNSQALQNVIERLDQAYQRFFEIDSAGRPGFKKREKYTSFTLTQTGWKLLGGNRVRIQNHNYKFVKSRPIKGEIKTVTIKRDACGYLWICFSVEKEPPTPELPRTGNAVGLDFGLKDFLVTSDGDRIQAPEPLQESLEEVQDLHKKLSRKERGSNNRKEAKRRLAKKYRQIDNQRKDFHFKLARRLFSRYDVVCIEELNVGAMKELWGRKVSDLGFASFVKILEHVAQKEGKEVRKIDRWFPSSQTCSDCSHRYEDLSLEERTWTCEECGSLHDRDLNAARNVLERALSSAEAGVRPSGAAARVARSS

SEQ ID NO: 3318 - protein, 383 aa, unidentified
  REGION 1..383: note = Table 20
MIQVRRTFKYRLYHNRRNKRLQRCLDVAGLIWNHMVALQRRTYRLSGCYIKRYEMQKHLAKLRRGSPRFAHWRLLGSQAVQELAERHDRGYQQFFAYKRGAGRRHGRPGYKKVKQYSSFTLKQAGWKYEGGNRIAIQGTTYKFSLSRPVEGEIKTVTIKRDSLGQLWICFSTVMDAPNVRVSTGNSGGFDLGLRAFLTDHEGKEYHSPQFLRAELNTIARRNRELARKQRGSNNRRKARWRLAKAHARIANKRRDAHWKLAHELCGRFDTICLETLSIDGMKRMWGRKVSDLGMAEFVEIVQQVAEKTGTQIVRVDRWLPTSKECARCGAVQEMPLSERHYDCPACGWSCSRDQNAALNVLAAGASAAGLGDVRRPLLAAVSA

SEQ ID NO: 3319 - protein, 229 aa, unidentified
  REGION 1..229: note = Table 20
MGDFYLCFSVEEKEKPQKATSGEIVGYDFGLSTILTATDNRDIHSPEYLQKDLVGLKKLSRLFSKKRKGSNNWKKARKNLARLHIAIANRRKDRFFKLAHTLSSRYKLMSFEDLDMKKMAKLWGRKVLDHAFSEFLSILKHVSKGYDTVLHFCDRYFPSSKTCCLCDWYNKDLQLKDLVWTCQGCKTKLDRNRSACFNILRAGASAHGLGDIRPHPEAVSVGIQESHLL

SEQ ID NO: 3320 - protein, 409 aa, unidentified
  REGION 1..409: note = Table 20
MRLADIPSVVSQTMCLPLTWKRDKSLIPDSPMRKSYKFKLQNQSNTIKIGNMIDDMWAIHLHIMLLDRRYYRIYGKNMSISRLNRHVRELKKRTKPHWKDLPSQAVQDVVLRYGKSRNAFFDNIKDRKAGKTTRKVGFPKIKTRHKYTSLTFTQAGYTLDNNRIKINCIDTWFSIHKHREIQGIIKTITIKRDRCGDYWICFSCDNVDDSEPKSMTGESAGFDYGNKTFLTSDTRHKIESPEFLKQSLKVLRSLSKALSRKVKGSGNWYRACRALARQHRKVARQRYDWQWKLSTELCTEFDILIFETLNLEGMKRLWGRKVSDHAFYQFLQLLEQKCAKHGKKFQKISQWTPTTKPCSDCGYHNKALTLSDRQWTCPRCGSHHDRDVNAAINIKRAGLAALSGADVRR

SEQ ID NO: 3321 - protein, 399 aa, unidentified
  REGION 1..399: note = Table 20
MKKKRKKKQHRRTYKYQIREHPQNRRLGNMLDDLCDVHNHFLKLENRYYRRYGKYAGRYRLQPHLTKLLERTHKHWTWIPRDILDAVIIRIHLSFKNFFDVPKFGRPKHKKRGKYRSAKFQSAYLLEEGRVRLSFKEWDAPSQSFKFNKRWFSFHQHRDWKGNVRYIQILRDAVGTYWLYIVTDDVSKEVLPATGESVGADNVIQGMDLVYSQTKSGMKDAFLTLSTGEKIQSPQFLKQSLKALRSLNKAFSRKVVGSNNWWRCLRQLTRLYRHVANQRKDWHWKFATDLCQRFDTIVTEKLNLRGMKRLWGRKVSDLAFGQFVEILKFKCLKHNREFLQSGQWTPTTKPCSDCGYHNEELSLSDRQWTCSKCGSHHDRDVNAAINILRAARGPSVEQT

SEQ ID NO: 3322 - protein, 405 aa, unidentified
  REGION 1..405: note = Table 20
MRRQTIIYLYKRRKNHIMATTAFKYKVYNVGRCKRKKLDGLLYLAAEIYNHAVALKRRYWRLYKRNPKKSEMQAHIAKMKRRCYPEWGKMDSQATQQIVDRIYNGYDLFFKRVAKRPPKFKNRHKYSSITFKQTGWALNGNTFTIRKLGLRIPFHRSRAIEGHIQTVTLKRDAVGDWWLFFTVRRETDSHKEAKPTTGKTAGFDFGMRRFLTCDDGTTIEAPRYLKESMSEVRRLSRNLSRKKRGSNNYRKARKEKARLERRIANKRRDFQWKLARDLAESYDTICLETLSLEAMRRRWGRKISDLAFGEFVSILAHACAKHGTRLVFVDRWEPTTKRCSSCGHVMGEMPLKVREWTCPECGARHDRDVSAAINIKTVGASTVAGGAVRRAQAPAAPSTAESHIL

SEQ ID NO: 3323 - protein, 370 aa, unidentified
  REGION 1..370: note = Table 20
MVKQFTYKIYRKPKNQHLDRLVNLHALLYNFCMARHQRYYRLTGKHLNQFRLMKHLTKLKSIEGFEWLNDLPSQSAQDVVQRIEKGYGLFFTENKRGNKRIRPPSFKKLRKYKSFTLKQAGWKLVADNRIRIVDRVYKFALSRPMAGEIKTVTVKRDSVGDFWVHFACEVDDKPTLAATGNTAGMDFGLKTFLTLDDGNEIDSPEFFKANAKAIQKANRAVSHKQRGSKSRCQAVKALARLHRKTERQRNDWQWKIARSLVAQYDTIWIEDLNLRGMKARWGRKVSDLAFSSFVQKLDDLAASNDKTVCKRDQYFPSSQTHFECGYVNHALTLADREWVCPQCGEVVQRDINAARMLKHGRAMSWSKDHL

SEQ ID NO: 3324 - protein, 366 aa, unidentified
  REGION 1..366: note = Table 20
MYNISFKAYKTKKLKHLHRSISTSAWIWNYCISLQKRYYSLYGGYINVNRLQKHIAKLRNKNPKWKELNSQSVQEICQRVDESYKRFFKGLAKRPPKFKKAKHFNSFVLKQSGWKIEDNILTINKRKYKFSKSREYENIKRIVVKRNKLGEIFFVFCCDLKPIKYERVGDATIGIDFGLKTYLTLSNGQEIKSPEFFKSNLKAIKSLNRQLSKKKKGSKNRRKALKNLQRAYIDISNKRNDFEWKLAHELCKRHSFIALEDLNIEAMKRLWGRKVSDLSFSSFVLKLEHIANKYNTVVQKVDRWFASSKTCTCGVVNKELKLSDREWVCSSCGEIHSRDLLASNNILSEGIRLYRTKCETSILEAI

SEQ ID NO: 3325 - protein, 382 aa, unidentified
  REGION 1..382: note = Table 20
MIAYKYKLYTTKQTKHLDAMLREASWVWNHALALQKRYYRMYGGYIGVARMQKKWVQWYGGSDRHHSQTVQEILQRLDKSYSRFFQHIQARPPKFKRADDFKSFVFKQGGYSLNGNVLTINKIKKRSKFSLSRRYDNVGKIKNVAVKRSPLGEYFVYLFIEANGEPVGKTHNGASVGIDFGLKTYMTLSTGERIQSPRYLKQALGMKRTADRRLSKKQEGSNHRRAARRAKNRVEEIITNRRDNWQWQLAHDLCRRFDTICIEDLQLTGMTSLWGRKMADLAHGKFIRKLEYLAGKYGVKVQKVDRFFPSSKLCDCGHIYKSLTLHDREWTCPECGHHHDRDLHAANNILRQGIASLGSPGKTREPGKATVRGRKHPRIPRL

SEQ ID NO: 3326 - protein, 367 aa, unidentified
  REGION 1..367: note = Table 20
MYVTYKYKLYSRCDRNKYLHREIDAFAGVYNHFIALHKRYYRRFKKYPGKYTLIKHLTNLKKTVRFSHWRLLPSQALQNVIERIDFGYQKFFAKDNKRPPKFRSKFKYKSYTLKQAGYKFLDGNKMRIGKRVFRYHKSRDFAVDSVKTVTIKRDSAGDLWLCVVAKAEAFKSFIVKTGKTAGFDFGLKTYLTASDGTKIQSPLFFNRNSRRVKKANRNLSGKKKGSNNRHSARVNLARVHRRVANQRRDYHWQLAYQLCKEYDVMCFEKLNIKAMKQLWGRKISDLGFSDFLTILKYVAKKTGKHVTQVRQGLPSSKTCSACDNIKENLELRERTFHCCKCGLEIDRDLNAAINIHRWGRPPLAEVA

SEQ ID NO: 3327 - protein, 375 aa, unidentified
  REGION 1..375: note = Table 20
MIAYKYKLYSNARNGHLDSQIDQFGRLYNHCIALHRRYYRIFKQSVNVYALTNHIAKLKKIERFHWIAELPSQAVQDVARRIDKAYLLFFRSLKHSVKAAPPSFKPRRKYKSFTLTQAGYAFNGNQIRIGKKRYGFHKSREMQGRIKTVTIKRDECGDFWIIAVTDWEKPGRGFTTGKSAGFDFGMKVFLTSSDGDDVEAPLFLKRDHNKRKALCRSLSSKQRGSNSRRKAKLALARFYRTIESRRNDFQWKIADRLVNKYDVLCFEDLNLKGISHLFGKKCGEYGFAEFLHKVESKCSEYGKGFVKIGRFYPSSKTCHKCGWIKSDLKLSERTWQCNGCGEIHDRDRNAAMNILRVGASTRGGEDVRLASASGL

SEQ ID NO: 3328 - protein, 387 aa, unidentified
  REGION 1..387: note = Table 20
MMKSFQFKLFKNKRKDQKLNDELYVFCKIYNHCLCLVKRHYKIFGKNPSKNKLQKHLRVLMNRGIKPEWKSLGYSQAIQDVTDRIYKSYQAFFAWCKKRSSEKKSPPKFKAFRKYKSFTLKQAGWKLDEEKGMIKIGKNYYRYNNSRNIEGRVKTVTIKRDQVGEWYIILSCDLGESYKPEKVIPMTGKSAGFDFGLSCFLTSSKNEKINSPEFLKQSLSELKSKSKKLSTKDKGSKNRKKARKVVARLHKKIANQREDFHFKLANDLVNKYDYLFFEDLNVSGMKRVWGRKVSDLGLDQFLKKVQFKAKEHGKTMKRIDRFYPSSKTCSKCTKVKKELALKDRHFHCNCGHQLDRDLNAALNILIVGASTIGLDGVSREFALASVA

SEQ ID NO: 3329 - protein, 367 aa, unidentified
  REGION 1..367: note = Table 20
MHRQINAAGLVYNHCIALHKRYYRLFKKYLDKNKLQKHLVKLKNQEKFSYIRELGSQAVQDITDRIDRGYNLFWRNREHKLRASPPNFKRVRNYKSFTLKQAGWKLNDKTGMIRLGKKWYHYFKSRNIEGKIKTVTIKRDPVGDIYIYIVSDVSTEEVIGRTGKSVGYDFGLKIFLTSSDGNDIISPLFFARSVKIIKNKSNNLSRKHEGSNNRRRAKLELARAYRKIFNQRKDFHFKTARIICEGYAIVCLEDLNLKGMQKRYGRKISDLGFYNFVQILKYEAKKFGTQIVFIDRWYASSQICNNCGYKNSELKDVRIREWNCPKCNKHHDRDRNAAINIHRVGASTLRGDKIRPDYPYGQSGVCC

SEQ ID NO: 3330 - protein, 383 aa, unidentified
  REGION 1..383: note = Table 20
MKTFKFKLYRSKKTRMLHHQLWVACKVYNHVLALHRCYWKLFHKSLSKFTLQKHITKLKKLPRFAFWNDIPSHAIHDITNRIERGYKLFWKNLKNKRKTALPKFKSWRKYRSLSYDMVGSSVISGNVIKIAGGKYKFFKSREIEGMVKLLTVKRDACGDFFVYLVCDTPEVRNETRMGKSIGFDFSFKGTMLVAEKQENDIPGPAFFRMHKDAIAKASRTLSKKKKGSNNREKARLELARLYRRVANQRHDFQWRLARELCRKYSVICLEDLDMKWMQMGHGRKVNEYGFAELNRLLEYVGRQFGTAIVHVNRFFPSSQLCNTCGFQNREVSDMRIRAWDCPKCGTHHDRDRNAAKNIHEEGLRILSDNLHKSEIQSGRGIVQ

SEQ ID NO: 3331 - protein, 390 aa, unidentified
  REGION 1..390: note = Table 20
MIKTYKFKLYRSKRNRKLHRQIEAAALTYNHCVALHKRYYRMFGRHLSKAKLQKHLTKISKFPKFSYLLEYGSQAVQQVTDRIELGYQKFFRKENKRPPKFKKLDRYKSYTLKQAGWKLDEENHTIIINQQRYRYHKSREVEGRIKTVTIKRDAVGDIYIFLACEVTQDKVPARLGKSIGFDFGLKEHILVAPEAGKDVDMPMFFRQNRRKMKKAQQSLSRKLEANVDHYIVRGKKRIPVWKRPLKECSNIQRQKKVIARMYRRTTNQREVYHWETARALCAEYAFISIESLNMRWMQKGHGRKVNDYGFSDFIKILRYVASRTGTTLIAVDKLFPSSQLCNDCGFKNAAIKNVRIREWDCPCCGVHHDRDRNAARNILMEGLRSSAVAR

SEQ ID NO: 3332 - protein, 418 aa, unidentified
  REGION 1..418: note = Table 20
MTNLFNYSILLNTSMPVRGGSGIQIVEFNARWMLTTTFKRLSGIFYYMVEVKTYRYKLYNRDALKYLDRILVIAGHIYNHCIALHRKYYTLYHKSLNKYALQKHLTKLKKRYTEWNEVPSQAIQDITDRIDRSYRLFYSNLKKGVKANPPHFQKSTKYKSFTTKQASYKFHGKNKIRIGVKEFAYWNSRSFDGKVKTLTVKRKSSGYYIYVVVEQESKTESIAKSGKIVGFDFSLNNFLVASDNSDCSIPKLMRKNLNSLRNLSRKYSKSKGKRGSLRRLQKLHEKITNQRDDLHWKLAHRLCKAYDVMVFETLDLASMDRRFKKSINDFGFNAFLSILEYVAHRTGKTVMYADRYFASSQLCSACGYKNAELKDIGIREWVCPSCGTIHNRDFNAALNLQKVGASAFSKQHPITGAC

SEQ ID NO: 3333 - protein, 595 aa, unidentified
  REGION 1..595: note = Table 20
MLVSKVEKIKVKLDNKNIKKYVRTCRIFNREYNSVLSELLTEKYSLPTREEWDDLISDIVHLKKEIKSLKSRKKTEDEIFEESKEALKLFKGEIIENKTEANNKLLEEKEKQLELLLEHKNNIQILANNSNITNTTINYVMGGSSFDSYLKSYFQRILVTSIDRFKAKPKNKSNTEFNKPLAGLPKYRKISTPITLEFTNQSYRFLKNNKNKITGIKLGTLFPNIKFRSKLSDEFLNNEIKINNIALTPVSQYSIIDGKFYILINYEYENLRPLPNFINKVGIDVGLSDLVVTSDGEKFNYPEGVLEKIEEKRTRLQSILSIKKNKNKYWKKSKRYKKLKNRIDKLYAKEKNIREDFAHQVSRYLVNKYDVITMEDLNIQGMLKNKNLSFKIANASWNRLAILLEYKSKNNNKIFRKSYRFYPSTKICNNCKTESEIFKGPQSLSIRDWICPTCGTHHDRDINAAKNIRDWEPESENAISKTYKMIEKVRKSQLRDFTNWIVFSTYLDILRKDNNRKTLNKLLKLSNIKELNQEDLNYIDELLEKDKTRQNRKYDLSNNKIKELKGLKQISQLENKLRVEQLNRICLRLETLNIK

SEQ ID NO: 3334 - protein, 556 aa, unidentified
  REGION 1..556: note = Table 20
MKYIQTFRLHPTPEQAAKIRQRFVLAGEAYNWGLAETERVWESEHRHLSYFDIKEIYQHHFNYKHHRPVSREEHEALCHLGHAYDNYFEKRCEKPRRKELDDMVSYTILARDILYRSDRRHAYLPCIGRVPCNFYRIVHGNPTTATIKEHNGKFHIVFLTELQEQQPNEQMPEIVGIDLGIKHFAMLSNGETIDYPEFIWDKKAYHREQHLQRRVSRRKMGSRRYEKAKQRLTRFLSHKANQQKDFHYKTAANLTNKFRAIAVEKLAIEHIKQIRAPYRRRINDIINHYGFKHFLFRLESRCKRTGTQFLQVGRFEPTSKTCHVCGYIRKSLSLKIRDWKCPKCGTHHERDINAAINIKALGRRIQQTLPHVEREVKTVEQTNRFCREAVKVTEKPYKKSQSACTLGASKYNVSRLAGISEVRTVTPTEFLQILSNFIRPSQICKLLDIKQAQLNSMCKQIGTHWRNQMMQEKCEYLRCIVIDELSQRLPTPEEVEPSVFVNLFMLRFQEWIRITKIGHNEDGMQPYIVKKNRIVWHSYINKIIETLKHITISLNP

SEQ ID NO: 3335 - protein, 464 aa, unidentified
  REGION 1..464: note = Table 20
MKEPDDMVSYTIRAEKVDIDYKKQEVRIGYIGRVRCNLYREVQDKPTTVTVKETRQGRFNLVFMAETAERQPKERTPEVVGIDLGLKTFATLSDGKKIDFPDRIWGSHASRHDQHLQRQLARCKQGSKRWLKAKDRLARFHEHRANQRKDFHYQTAAKLTGKYKAIAVETLAIEDMMKPVEGKGKRRNMNRKLSRYGLHQFVRRLEARCNRTGTQFLQIGRWEPTSKTCHVCGYKLPTLDLKTREWTCPECHTHHDRDVNAAINIKTLGQRIQQTLPDVGGEVLTVEQTARPCREPVKADSETPVTICPAPSPQEEKEHNMSRLAVKKAAERTFTVAEFLKILQPVVVPQKLSQITDLEVTQLSTIRTRGWTLDWRQQMMLERCEALRVELLDVLRDKIPDLYASSPKEYAKQFNANLKGWLRFACIKKEDPRLTFPSTKSNCIFWHIYINRLIRNLEAIKLKT

SEQ ID NO: 3336 - protein, 276 aa, unidentified
  REGION 1..276: note = Table 20
MFLSPSSLLTCQGLENTIGIDMGLKAFLVDDSGEEIAIPQHYRKAEKHLKRLQRLLSRKKKGSNRRKEAIKRIAKAHLKVANQRKDFHYKTAKKLLSQGKHVAHEKLNIKGIACDRGESKRYFSRLLKLRSPASVSDFGQVFDNSLRICVRAASLQENRLRLNMGQTKLFVPLQYQEAFRYFIDRTQQGSKNRGIIHALFVFKEAVEHHGLIGGAAIAGRQGVEDGGINQALNRLTNRGKSWNSSDWSKFCRAGAQARASSAMVSPAMRSNTPWGM

SEQ ID NO: 3337 - protein, 343 aa, unidentified
  REGION 1..343: note = Table 20
SYCVCANRLPGLKKSPDTCWLAEGDSIALQSSLRNLADAWSRYYAKQNREPRFKSKRNPVQSYTTRYVGGNIAVGDSWIELPKVGRIRTVVSKPLKGRIVSVSVKRHGSGRHYVSVLCEEPSLPAVGPMFLLPPTGRTVAIDLGIKSYATLFDSDGHVSVISNPRHFGKLEERLAIEQRKLARKQKRDANGHESNGRRRQARKVARVHERIGDARNDALHKLSTYLVKTHDVIIIEDLDVAGMIADSPQGGCAKAVADAGWSEFRSMLEYKCRWYGRKLVVVDRYFPSSRLCGTCGAVNRNVKDVKIRQWTCPVCGAVHDRDVNAAQNLLREGTRILAAQKAV

SEQ ID NO: 3338 - protein, 395 aa, unidentified
  REGION 1..395: note = Table 20
MTKTVYKAFRYSIEPTEEQRDLINRTFGCSRFVYNRFLSEWDTQYRNTGKGLSYTRCSAALTELKKTYDWLNETDSTALQSSLRDLSAAFHRFFQKQNEYPVFRRKSSAESYTSKNNNDSIRFVDKNHIRLPKLGPVRYRNSREVEGKIISATVSRKSSGRHYVSVLCECEVSELPATGKTTGMDMGISDFAVLGDRTRISNPRFSTKLRDKLAKEQRRLSRMEKANIDRYDTVTVNGTEYRKPIYKRPLSECRNYQKQRIKVARIHEKIADRRRDFEHKKSTELIRKYDTIILEDLDVKGMMKDHSFAGAISEVSWSEFTAMLEYKAEWYGKKVVHVDRFFPSSQMCSECGCINPAVKDTRVRKWVCPHCGAQHDRDVNAAINIEREGLRLIGV

SEQ ID NO: 3339 - protein, 407 aa, unidentified
  REGION 1..407: note = Table 20
MAKRTNDLPKKAYKFRVFDHTAPKPFFAQSFGCTRWTFNQALGYVNHAWEKTGSFPTKNEVVKQIPQWKVAFSFLEEVDSIILQKAVEDLFEGFDCFKKTKGKQMKKSFIKQVKMIPSLSPKVWDFKGYPRFKSKRHSKKSFTTKMTNENIKLVQIDNKHYVKLPKCNHLIRFKKTREIEGDIKTVQVETDNLGKTYITFTCELLSSKIVPKATNDALGIDVGLTSLITDSNGNHLPVPVRYSSYKKRLTFLQRKFSRQQKGSSSREKTRRKMAKLHQKIYNTRLDHLHKLTYRLVRDNQTIAMEDLDVKQMLEARKYSNSIAHASWGKLKELLTYKCKSYGRTLIKVDRYFPSTQMCSACSDINPALKGNTTIRKWTCSTCSASHDRDHNAAINILNEAKKMVSAT

SEQ ID NO: 3340 - protein, 405 aa, unidentified
  REGION 1..405: note = Table 20
MKPSLNHKAYKFRLYPNQTQQALFHKTFGCVRFVYNHVLDLQIENRKTAGKFRSKTDTIKTLPLLKKQYSWLKEVDSIALQATLEDQFEGFERFKDRKKSEMRKSALRKQRKYGYTPEEKDLKTHPVFKSKKNPAASYTTKMVNNNIKIEHNRIHLPKAGWMRFSKSREIEGRILNATVRRSATGKYYVSICCELNQSPLTRPVSNDMIGLDLGLNHFAILSNGEKVGNPRFLRQHEKRLAFLQRALARKEKGSRNYLKNKRAIARLHEKITNRRLDFENKLSTRLILENQGIAVESLKVQNMTQNKKLAKSISDASWSSFVAKLKYKAEWHGRAFVPVPAHFPSSQLCSSCGVQNPEMKELHVREWTCKHCGATHDRDINASKNVQKEGLRLLTESTVRTTGVA

SEQ ID NO: 3341 - protein, 382 aa, unidentified
  REGION 1..382: note = Table 20
MLVKKAYKFRLYPNERQKELIDKTTGCAKFVFNFSLAEQRKKEKLWLQVKELVQAGISLFEEYKTGLFSKYQAVPNIPKLKKNYSWLKEVDSTALQSSIEDLHEGYTRFYKKQGGKPRFKSKKNPVQSFTSKRASNNIEVIENRIKLPKLGSVKFANSREVVGDIKRITVRKAPSGRYYISVLTDTEVVQLPKTGNTVGIDVGLVRFATLSNGKEYVLPTSPKLEQKLIQLQKVLSRRKVGSSNWEKQRKKVARVYEKIKNMRTDYLQKFSTMIIKNHDNIGVEDLKVSKMVKARTFSKEIGKRAWYSFRVMLEYKALWYGKKVIAVNPHCTSQTCSKCEHVSKENRKSQSEFECVSCGYKGNADVNAALNIRDLVLVEMGC

SEQ ID NO: 3342 - protein, 374 aa, unidentified
  REGION 1..374: note = Table 20
MSKIVYKAHRFRLYPNKTQCVQMAKTFGSVRFVYNHFLDAWNTSYTSTGKGLSESSCKKALPPLKVVFSFLKEVDAIALQSACEDLAEAFQNFFAGRANKPVFKSKKRKKFSYTTKCTNHNIALFDKAIKLPKLGLVRAKVSCVPTGRILRATVSMRPNGHYYVSLLVEEELQPFAKTKQAVGLDMGVAHLVTTSDGVHIAHPHAFSKYEQQLARSQRVLSRRMERAKKDGRDIKTAKNIQKARVKVANIHERINNIRRDYLHKLTTSLVRDYDIIAVENLTVSTMLAHKPLAKSIADASWRMIREQLAYKCEWYGKTFIAIEPAYTSQTCANCLAVDKASRKGQWFTCTACGHTDHADVNASKNIKQLALASL

SEQ ID NO: 3343 - protein, 380 aa, unidentified
  REGION 1..380: note = Table 20
MKTIKRAYKFRIYPTAEQEVKIRQTIGCSRLVYNHFLAECDTSFQSTGKRLSYGVTSKGLTSLKKVKTFLKDVDSIALQATLEDLDDAWKRFFNKQNKRPVFKSKKRPRQSYTTKNVNDNLKVVDVDGVPKLKVPKLGLVRVAWSRQLKEETHIRRATIQIRPSGKVFISLLVEETISPLPTTNEAVGIDLGVTQLATLSDGTMALNPRNLKSMEAKLIQAQRVLSRRIERAKKDGRPLRDAKNVQKARMKVARIHETIANRRNDTLHKLTTEWVRRFDTIAIEDLETSKMLKNSHLARSISDASWSTMRQMLTYKCDWHGRTLILVKPNDTSRRCHECGHIDALNRPTQTEFACVSCGHTAHADVNGALNILARAQGVW

SEQ ID NO: 3344 - protein, 404 aa, unidentified
  REGION 1..404: note = Table 20
MVKWDNASGIQMKVTTQLRNSLWNFARVDSNVLQRNVAHLDTAFSNFYKLGRGYPNFIRRLDSFEYKPGYVKLRHIRKNYATAYLPGIGDVKFHNSRDLTLIQDLRTCTITRKGGSWYISMLVNIADILPDVMPLEKCKSVVGIDVGINKLIALSDGSFQENKRISTNKRTARRMAMRQRAISRKLKGSKNKIKAVKKLRLQQHKLAQHRDGYDWQIAKVVVDTADAIAKEDLNIKNMVKRAKPKHDGKGGYKRNNAAQKTGLNKVILDASWGDIFDKIAWLALKAGKPVVEVSARHTSQECPKCGHIDKKNRKGEKFLCTVCHHVDHADTKASRTIGKRVGLVFLKNKKTLRADCAKVTPSSYQSDWVETGNHAFEVAGNDASNLTVGYLRDMAEPLKESPHL

SEQ ID NO: 3345 - protein, 542 aa, unidentified
  REGION 1..542: note = Table 20
MQVRWNYKLQPNKGQDAFMSEWLVTLRKHRNYCLAERRRGFESNNQHSDQSVMYSYGAFCDIETQVEYGSFCPLTCPVVKHGVMSADTLTKQDGKWLSVSGVQSVRTTELRNENPFYSRIYSGVLQGNLAKLDAAYLGFFTHKRGFPAFRKASNFNSFQYKPGAAKLTVNRTSKKKRCYSHVYLPGLGDMRYLDSRTIPENADIRTVTVMKEADGWYMSVLLNLAESLPEVTPIETVTSAVGIDMGINKLIALSDGSFIENPKFATNQKTRRQLRIRQRRVNRKVKGSKNRRKAGIEVAKLHKKIADKRNNYQWKAAKKIVNTADAIIREDLNIAAMKLRCKPRRIKGRFMRNAPPGSIPVDTFAQSSPRGCSPVADFAPNGQSAKRGLNRSISDASWGNSFSKIDWLAAKSGKPVMTINPRHTSQECSACGHISKLNRDGEKFVCEACGHIDHADTQASRTILRKANLIFVSNRHKKPTHQSLVPTPGLGESNALLCNDVATCGKRHQAGNRISKACTEPSRSVISENRILFEQLCLKLFD

SEQ ID NO: 3346 - protein, 510 aa, unidentified
  REGION 1..510: note = Table 20
MLAGYVYKLRPDDEQATKMDNWLDMLRSSYNWCLNDRIEQYYQQYICGDYCDLRTKAEACALTCFVSKNGASGEPWKLDNSEVEIIGECCLLPYDLNNLPYSGKTPRRSAGDIQITTLPVLKKARPWFKDIDSTVLQQNIKRLDTAYKNFFEGKGFANFKNKSNFRSFTYASGVRVEGNKIYLPKLGWMRFYNSRPIPDGFTIKSVTVRKKSNGYYVSIRIEDKSVPDYIPLPIEQVNTAVGCDVGIKKLVSLSDGSQVKNPKFSTNKKMRRRMKIRQRRLARKKKRSKNRKKAANVVGRLHQKISNQRTDYQWKVAHQIVNKADLVVFEDLKVSNMKKRCKPKFDSDTGKYLNNGQSRKVGLNRSISDAAWFELRLKTEYVAAKSGKRFEVVPPHHTSQLCPECHHVDSSNRDEEKFLCSVCGYAADADNNAARNIKQRCLDKFNIKLTLKPHIKKEKAVRRDLPEPEQLTLGLILFETPTCEVTRVQRSYVRARNSKRSQRTEPLEAA

SEQ ID NO: 3347 - protein, 500 aa, unidentified
  REGION 1..500: note = Table 20
MLMGMVFKLKPTKQQATELSNWVDMMYHQYNYNLKDINYTYYATQEDWTTSKNFPLIHCPLTCCISRNGASGEVYTQKPDKKTGLLKRRSAGAIQDANLKELKKSRPWYRRVNSTALQQNVKRLDNAFDGFFGNGKGRPKPKRRSKFKSFTITNIENKDITSTGINIKSLGWVDYHNSRCIPDGFKVKSATIRQKADGWYISIKVEDKTIPQSVEVKPEEIKTVIGCDLGLTKLVHLSDGSQINNPRFNTNKRTKRLMRVRSRRASRKKGKNNKRKAYNRIGRLHKRIKQRREAYQWQVANKIVKRADAVILEDLNIKGMSARCKPKKDENGNYSKNGQSRKVGLNRSIADASWYSLTQKINVVAAKLGVLIVKVSPQFTSQKCSYCGHIDKSSRDGEKFICSNCGHFDHADLQAARNIKLKGIEQLGIPVACRFPAKYSKTVRVDCSEPKQLRLFETPYPESTGVKEIKRRSRSKKRLPGNSLGEQLNLFDVDKIVDSN

SEQ ID NO: 3348 - protein, 476 aa, unidentified
  REGION 1..476: note = Table 20
MIISYDYKLNPSNNQSALMSDWLNMLRGLYNFGLRERIEAYEQVKYPMLGNYCRLDNRAECCPLTCSLSKSALHGEPWKLDKDGKGKKRSAFEMQCVTLPQLKIARPWYKQINAQVIQQTLRQLDTAFQNFFKHGRGYPKPKRRSHFRSFSYPPGAGVKIKGNRIYLPGTGWMRFFLSRQIPDGFSIRTVTVRRKSDGWYISVRLEDKNVPLPPTKTSPDVATALGADVGIRKLVALSSGETIQNPRFSKRVEKRRRRLHRAASRQKKGSKNRQKSYQQIGRLEQRVENQRNDYQWKVANRLVRQADCIVFEDLNIRGMTARCKPKVDPETGRYLHNGQAAKAGLNRAILDASWYGLKQKVKAVAAKSGAIVLDVPPRHSSQECRECGYISPTNRDKEKFLCESCGHYEDADIQASRVLLARGLKELGIEQLCGVPAKVTPKPEVTGCKEISPALVGEPGNPRQLTLFDLTEWRGA

SEQ ID NO: 3349 - protein, 488 aa, unidentified
  REGION 1..488: note = Table 20
MQVTYRFKLYPSLKQVSRLIQWQNKIRSLLNVCLADRIDSYQDTFMQGEFCNLRSRGVASPLACSIHKSASLGEYWKENNPSKRRGDKSKLFNPRRSAYEIHSSFATSWRQTKPWYQDVNSDVLQQGLRNQNKAFGNFFSGRANFPRFKRTRDIGLEFKPGTVRIQENKIKFPSLGWMKFALSREISNNWSIRTVTITREIDIWYVSVLLKDETIPDYSQKSATELNTIIGCDVGINKIAAFSNGEIETNPRIGERFERRLKIRQRRLSRKKKGSNNRQKAGIAVAKVHRDIRRCRQDFQWKLGKKIAAMGDIIAFEALNIQGMKKRCKPKFCSQTGKYLSNNQKSKSQLNKAISDAAWYSLRQKTQHQAAKLGTWVIEVNPRGSSQECCKCHYISPKNRDKEKFVCENCGHYDDADLNAGNILAQRGKEKLGIDTLTVVSRKVTTEPELTGASGNRKNISSAMVDESGNPALFVQLKLFSDWEWNTG

SEQ ID NO: 3350 - protein, 393 aa, unidentified
  REGION 1..393: note = Table 20
MPKSITTYKLKLKPTREQSAKLDQWLGVCRLIYNLALDTRIQAYQKKKVKVSKSELQLQVKQLAEEYPWIKSVQSQVVQDPLVRLERSYKNFFRGEGFPKFAKKGEYRSFTFPQGVALKGKKLFLPKFGELSFFSGKRDLSTFTIKQGKVIKEATGWFISLMGEVDIYHLEKNDRKIGIDIGVANYIVTSEGEFVANPQIKKSFAKQIRIKQRSIARKKKGSSGRKKEVVALQKLYLKERNSRNDFQQKLSTRLINENQVIVAEELKFSNMTKSAKGTQEEPGRKVKQKSGLNRSLMDVAGYSFFGMLGYKADRYGRAFLKVNPKNTSRECPCCGHIEKGNRKTQAVFLCLNCGYTKHADYVAANNILGRAFPSGDTIGVTRGPEKLHLQLIV

SEQ ID NO: 3351 - protein, 365 aa, unidentified
  REGION 1..365: note = Table 20
MEVTQTYKYKLKLTKEQVNLLNNWIGTCRYVYNLALDTKIQSYQKGVNVSKYDLMKQLTDLKDVEWIKSVPSQSLQNVVERLDFAYQKFFSGGGFPKWAKKGEYSSILLKSVKATDTGFILPKIGEVRIFKDRMPKGKLKTATITKEGNGFFVCVTFGSQSKNLYPTDEKQVVGLDMGITYFLTDSNGCFVENPKHTKKYEKQLRVKNRALARKKKGSSGFRKTKSELKKLHSKIADVRKDFLHKISFQYVRDNSLIVCEDLKVSNMIKFGSLSKHIADVSWSIFFDQLRYKSKQYEKTFVQVNPKYTSQKCNSCGHTAKENRLNQANFHCVSCGHQQNADYNAAKNILGEGIALNRQREALACA

SEQ ID NO: 3352 - protein, 356 aa, unidentified
  REGION 1..356: note = Table 20
MIKTYTYKIKPSEKVEQKFNHLVGICRFVYNISKEVKEESYRRGLRLSCFDIQKQLTDAKKEHTFLKDVHSQTLQAVIDRLDNSFKKFFKGAGYPKWASKKKWKSIPFKSIKTTHNAFKLPSFGVVKVFKFKEPKGDLKTATIIKEADGLYLKIVVDEYNSKVKNRDSQSVVALDMGIKFFAVTSDGEYLENPKHLFKNLSKLRIENRKLSRMKKGGSNWKKQVIVVQRLYLKVKRCRLDFLQKQSTLLSNNYENVIVEDLNIKGMSKNKRLSKHILDCGWGTFFSLLEYKTNVIKVNPRYSSQECSKCGHTCKENRKTQSLFECVNCGYTENADHQATFNLLQRGQSLMEANVVH

SEQ ID NO: 3353 - protein, 358 aa, unidentified
  REGION 1..358: note = Table 20
MITYTFKIKTTKTLENIFIEHLNTTRCIYNLAKEVKEIAYSKGVKLSKYDLSKQLPELKKECKWISNVNAQTLQGVIERLYKGYDKFFKDLKRGVKVSKPHWASKRKWKSIEFKQNSNILRFEKNKFKLPKIGLIKIFKSREVNGNIKLTRVVKKADGWYLQIVTDYERPKCENQAKIGCDLGIKHFLVTSDGQYFENINTAKKFKKKLRVAQRSLSRKKKGSNNWYKQVERIKKLYLKIQRVREDYLHKISNDLASNYQYIFLEDLKVSKMIQNKNYSKSISDVSWSKFSSYLEYKTNVTKVDAKYSSQECNNCGHISKENRPNQETFKCVKCSHSGNADENAAKVVRKRGVARLLK

SEQ ID NO: 3354 - protein, 393 aa, unidentified
  REGION 1..393: note = Table 20
MLTHKRKLILNQAQQSRIDGWIGVCRLVYNMGLEIRIASWKSRQKFVSKFELINQLPELRKIEWIADAPADSLQAVIERLDKSYQKFFKGGGFPKWAGRRKYNSMLFKRATLESNKIKLPKIGLLKMFKDSEIPGNIKTVTIKKELTGYFAYIVTDAVKEISRPIGENQAVGIDMGISSFCVTSDGHVVENPRHFKKYERKLRIEGRSLSRKKKGSSRWKKQARKLGLLHHKIGNVRKDFLHKESTKLAAKYSTVYLEDLKVGNMSRKAKPQQDESGAFIPNGQSAKSGLNRSILDAGWGMYREMLEYKITVETVNPKHTSQECFICGHISPDNRKSQSVFECTNCGHSDHADSNASKVIKGRGTAHSRERKSLDYALAVEPSFGYVSNPRRR

SEQ ID NO: 3355 - protein, 317 aa, unidentified
  REGION 1..317: note = Table 20
MKKVPSQALQQAVERMDISYQNFFKGGGFPKYAKKDFYTSFQVKQGVKITKNKIYVPNIGWVRYFNSQEIKGLQKIKLITIKKQSDGYFISLCVAQINPFSYIKPMSDSQAVGIDLGVSNLAVLSNGIMYSNPKALKKHADLMRVEQRSLARKVKGSSNRNKCKKRISKLHLKIKNIREDNLKKATTEIVKNYGGFVLEDLKLKNMSKSSKGNAEKHGKNVAQKSGLNKSILDSAMGKFAVYLEYKSDWYARTFEKVDAKYTSQDCFVCGHRSKENRKTQEKFKCVSCGHQDNADVNAAKNILARAKARSRKAQAVV

SEQ ID NO: 3356 - protein, 308 aa, unidentified
  REGION 1..308: note = Table 20
MSLSFEHFFRGAGFPKWASKHSWHSFRFPQAHNNSIRIEGSRLRLPKVGWVKFYYHRQCEGCIKQVTVKKQAGAYFAFILVEQCHDPVPASEIQAVGIDLGIARLATLSTGEWYANPKLFQRFGPEVKRLQRKLSRQEYQSNGWKKTKRRLSRVHAKAKRCRQDYLHKASTAIVRKYPALVVEQLQLQNMSRSARGTVSRPGKRVRCKSGLNRSLRDVGLGQFLEMLEYKCRWNGRSFKRVYPRYTSQKCANCGHTSPENRPTQAQFRCVNCGQADHADINASKNIRDLGRISGSQYGQGLRALPVSA

SEQ ID NO: 3357 - protein, 384 aa, unidentified
  REGION 1..384: note = Table 20
MRYKAYRFRLEPTSSQREQLGSIAGSCRFIYNHFLATHKERYALRKEQSDPTIKFLTYPETSRWLTLLKREEATSWLQLSYHDSLQQSLMDLDRAIKGWLRKKTGFPRFKKRGVRDAFRLPRPPKIDGNLLKLPKLGWVRFRKSREVIGVIKSATVSREGDHWFISLLTEQCENLVPHPSSSWVGVDLGVTHFVTLSTGEHIDLPKLSHLIERVTSLQQRLSHKQKGSHNSQKAQHRLSTAHRRLRRVRHDFLHKVTTHLAKNHSVVVMEDLKVGNMMKSAKGNKDHPGRCVAAKSGLNRAIAQQAWSTFRQLLSYKLADLNGELNVVDPRYTSQTCPVCLTVDRRNRKSQSHFSCVSCGHTVNADYNAAVNILSLATVGRAVN

SEQ ID NO: 3358 - protein, 436 aa, unidentified
  REGION 1..436: note = Table 20
MPRFRLHPTRAQEAQLFGHCAQARHAWNLALEVNSSYRKGGARTERPPRFAGMCRMLSQVRQTDTTGMSSEEADYINWVASGNVDVQQQALRDFDQALTNFFNGSHRYPTPRKKYRNEGFRIIGTGRVLAFTADGEPLLNAKGKQVMHRKVLVHKLNKKWAQVKIPGCGWVKFRNTHQGLPDAKSYRVTYRHGQWHISFAVVPDPIEAPGDGSVVGIDRGVTITAALSSGKMLNCPQLSKKERAKRRKHERRAARAAKGSPQRKAELAKVNRYRRKEANRRKDWAEKTSTRLARGFDTIRFERLNIKNMTASARGTAIEPGRNVAQKSGLNRAILAQGWGLLRTRTGHKAPGRVEDIPAPYTSLQCSDCKWIDKNSRKSQAEWSCTNCGFTCNADLNASYNVAAGQGASPGSKTRAGGATRRDPVSVREPQQLPLF

SEQ ID NO: 3359 - protein, 188 aa, unidentified
  REGION 1..188: note = Table 20
MTRFRLYPDEGQEETLLVHCRHARYVWNLAAEQQSWWNPRRGPAPGYAEQNRQLTEARHVAFAVVPDPIPAPGTEEVVGVDRGVKVAAALSTGELLTCPGLRPGEAQRLRRLQRRLSRAQRGSNRRARLKAQIARVKAREADRRKYTANADINAARNIAAGRAVTARGGSPSGLPANREPQQHELLFV

SEQ ID NO: 3360 - protein, 397 aa, unidentified
  REGION 1..397: note = Table 20
MSRFRLLPDPAQEAALLTHCAHARFVWNLAVEQYAHWRQGRTAAPGYNDQCRQLTEARAAFDWLAAGSVTVQQQALRDFAQAMRNFFSATHRRPTWRKAGVHEGFRQVGVMPEHIRKLNRKLSAVSVPKIGWVRSRRSRAVPGGVRSYRVTRDRTGRWHVAFAAVPEPIPAPGTGETVGVDRGVAVSAALSTGELLRCPDLSVKEAERLVRLQRRLVRAKRGSNRRKRLKRAAARLRARAADRRKDWAEKTSTDLARRFDRVYVEKLNIRAMSKSARGTVTAPGRNVRQKASLNRRILASGWGLLAVRLRHKAPGRVDGVNAAYSSQECSVCGHIAAESRESQARFRCVACGHEVHADINAAININNRGRTTLAARGALQPPGGAVNREPQPESPAA

SEQ ID NO: 3361 - protein, 394 aa, unidentified
  REGION 1..394: note = Table 20
MAHKYRLQPSDVQLPVLGMHCAHARAVWNVALEQANLYRKHWGPTPNAAMRQRQLAEARKESWLGEGSSSVQQQALRDFDQALKNWWAGTHGRPTWRTKERNNSFRVRDVSVRKINRRWAELLVPKLGMVRFRLSRPLPAEYGMATISMDRAGRWHVSFTAPQPTFERTRTGETVGIDVGVAHTLTLSTGEHLDMPALLTPGEAQRKVRLQRQLARQRKGSERRERTKRAIARLSAKEADRRNDWIEQTTTTLVRTFDRITIEDLQIKNMVRSAAGTVEKPGANVAQKRGLNRSIHRQAWAKWRTRLEQKAAAATEECQVIAVNPRGTSQRCACCGHTEPDNRESQAVFVCRACGHRANADVNAANNLNAAGHAVAGRGGRHGSPDEASTTRAA

SEQ ID NO: 3362 - protein, 412 aa, unidentified
  REGION 1..412: note = Table 20
MAVRNRMYPGAEADAVMRDLHCAHARFVWNLCVEQQSWWWPGRGSAPGPARRQRQLAEARTAGPWLAEGASSVQQQALRDFDRAMAAFFDPGNPAGKPKFRSKRGTQGFIIRDTRVRRPNRKRGAVHVPKCGWARFRWTRPLPDKPGMARVTLDRAGRWHVSFPAPQPAVDRQPTGTAAGVDRGVRTALVTSDGQHYRAPRISERQAARYLTLQRRMSRQRKGSRKREKTRRAMARITVNVTDRRKDWAEKVSTRLVMQHDVIVFEKLNTPGMVRRPAPKPDPEQPGVYLPNRARAKAGLNRGILASCWGLLATRAEQKAAVSGAVVIYADPKHSSQQCRVCGHVARESRDSQALFRCVACGHEDHADVNAAKNVLARGLAVAGVPAHAPGHGVSRPRQPERSAAGTTRSAA

SEQ ID NO: 3363 - protein, 415 aa, unidentified
  REGION 1..415: note = Table 20
MSIRQRAYPTPEQTEMLYTHIHHTRFVYNIAVAQRMMFDRQSRERQRVKDTDDPSKLRLNLRHQGHDLAELRQELPWLGEGSSAVQQSALRDVEKAFSNFFARRASYPHFKRRDDAKSFTVRDVSVRRLNRRFGVLTVPKAGSLRFRITRDWDDIRKAKSARVTLRNNCWNVSFTTDPPPRRETGDGVLGVDCGVAITLATSDRDMLHVPTLSGGERKRFVSLERELARKPKKKGEPDSANRTKTKHKLGRLQQRLTNRRKDFIEQMTTFFAESYEVAVLEKLQIANMTKRPKPKPDRVKTGQFLPNGAAAKSGLNRAILASCWGMFNQRLSDKMLVVKVSASYTSQQCHRCGHTAEENRKSQAEFCCQQCGLVDNADVNAAKTIRNRYLQQPRDTGDRVEAVATATVETNLQIV

SEQ ID NO: 3364 - protein, 421 aa, unidentified
  REGION 1..421: note = Table 20
MRSTGIFCIIDHVSIKQRLYPKPHQEHGLVVHCGQARFVYNLGLSQRKALTRNYRQRGVKVTYATQCKELAQLRSDVEWLRKGSSEVQQSALRDLDRAFGNFFAGRTKYPVFKKRSSKQSFCIKTASIRRYNKRNAGVHIPKVGWVKFRISMKWWQLEKATSARISCVNGKWFVSFTTPPPDKKKAGEGIVGIDRGVKITAMTSDGDALTIPESVAESKRYNRLNKALSRKDKNSAGRKKILRKMDSCRFTIANRRKDWLEKTTTILARRYSWAVLEDLKTSSMTKRVPPKVAPTGEYLPNGQAAKTGLNRSISSASWRMVETRLSDKMNVVKCPAFYTSQRCFRCGHISAENRKSQAVFSCTQCGHTDNADHNAALNIRESGSSLINNHAPREDFALCLNDGEDPTGKILTSGIAGNPRP

SEQ ID NO: 3365 - protein, 409 aa, unidentified
  REGION 1..409: note = Table 20
MSLKQRMYPTEAQRALMVMHAEHARFVYNLGLEQRSMWTKDKRHFEQKITVYSQGKELTELRQELDWLRAGSSSVQREALRDLDRAFQNFFARRARLPRFRSARDPKSGFAIRDLVLRRINRRWGKVLIPKVGWVKFRLTYPYRDAQQGTSARAVHHNGRWHVSITTPPRPKVPACTGAKVGIDVGVANTVASSDGIFIQAPSWTRGEQRRFLALQRRLARQEKGSKQRARTLAKLAGLRRTLKDRRTNWVEQTTTALARIYDLAAVEDLKIANMVRRPAPRPDPDIPGSFLPNNARAKAGLNRAILASCWRQFTTRLAQKMDVIRVDPRNTSRQCQSCQNIDARNRESQAVFTCMECGHQAHADTNAAQNILDRALITNPGTPGVRTQKPWRRAASTIPSATAQPAQG

SEQ ID NO: 3366 - protein, 404 aa, unidentified
  REGION 1..404: note = Table 20
MVVHCGHARFVWNLAVEQSNMWRRDKGPTPNYVAQAAQLAQARREHAWLGAGSSVVQQAALRDFDRARQSWWKNPHHFSRPTWRKRGVHEGFVIRDLTVTKVNHRWATVHVPKVGAVKFRLTRPRAQVTAATSARVTFKAGRWHVSLVTPPPVFDRKPTGAVTGIDRGVANTIATSESVMGSIPGWTPGEQARYVALQQQLARQVKGSNRRAVTKGKIARLHQRLTDRRTDWIEQTTTTLVREHDLIGIEALNTRGMVRKPAPKPDPENTGVFLPNGAKAKAALNKTIHASCWGKFAKRLHDKAANTPAGAKTLVVEVPARYTSQRCHHCGHTAPENRKNQAEFRCVDCGHEANADTNAAENILSRAITLAAGQAVDPRPRRTVDGRNRGTTTTASTTRERKAV

SEQ ID NO: 3367 - protein, 614 aa, unidentified
  REGION 1..614: note = Table 20
MFVREDARPVLRDENQVSVKQESAVPASANRVPVDHDTKCRIGSVKADTGRRYRLYPSDEQAVRLASWGHTCRWLYNTAWEQRQFAWRQRKVTLGLAAQCASLTQARRDFDWVADLPAQSGQQVLRQLNQAYQNWWNPQHPAGAPTRKRRSVRLSIPFPGQAVHVRRLNRRWSAVTLPKVGEVRFRWSRPLGGAVRNAVVSFDGVAWHIGFGVHAGVKAPEAHAQPGTVVGVDRGVKVALAMSDGRMWNRAFTTAGQERDLARLKSKAGRQETARRKRGLKTSNRARKVRAEIGRTEAKIRNRRRDFVMWAANRICAQHAIVKLENLNTKAMTATAKGTIEEPGTNVRQKAGLNRAILDKGWGMFETALANQGRTTGTRIVKVPAAFTSQRCSRCGNTHPNNRESQATFRCGSCGHQANADVNAAINIRDAAEATPPLTGRAVRDRNRKASCRPPTHPALQATGAGSGNLPPLGRSGCQGNKEKLFAAAAEFDLHLPDARQLPQERLGEALVRHFLQRWEVDESLAALLRAAVTNNAAAERMRQIFATQVAPAVAAGCPDPAEAARRAGLIASQILGLALCRYVVQLPPVAAMTSDELAARVGPVVTGYLTGAS

SEQ ID NO: 3368 - protein, 490 aa, unidentified
  REGION 1..490: note = Table 20
MSTECAWEKRQFGHRARLALTPAQVQLMDDQAHAARTMWNCLHDWWTMLPKERRSLAAADVAIRQARREVDWLGVLPAQAAQAVLKTYFQAWRNCWEGRADAPNFKARFRSVMSVDVPQGRDLNITRVHRRWGMVTIPKVGRVRFRWTKDLPVGKRANADNRITGARLVKDSLGWHIAFRVQTRESKPVPHTGPEVGIDAGVTVPLALSDGNHQMHERWKSTKEKPNTWLTEKEQAKLLCLEQRAAQRKQHRKPGERTSNRLRTTYDQIAGLRARAKRRHLDWQHQTTTGLAWQYGTVVVEALQVTNMVRSARGTVDEPGKNVAQKRGLNRSISQEAWGRTVDILTYKLAQRGATLHKVPAPGTSQRCSECGLTTPGSRESQALFVCRNTGCGWSGNADHNAARNILHLYRMGHALIPAAGRAVVRRAKRVKPTAARQVGISRPQPEEHFNEVMRHRSASARRWRRCCWPTRRRSCCCSTSRATTWTWRA

SEQ ID NO: 3369 - protein, 240 aa, unidentified
  REGION 1..240: note = Table 20
MRPAQAAQAVLKTYFQAWKNGWEGRAQAPEFKARFRTRMSIDTPQGRDLHVVRVHRRWGMVDIPELGRVRFCWTKDLPVGKHADKDNKITGARLVKDALGRHIAFRVTTLAPAPGPHPGPEAGIGAGIGAGITVPPALSDGETAQHGLWLLARRGGLLAEVPAPGTSQECAQCHTVTPGNRRNQAEFVCNNPACGWEGNADTNAAHTVLHRHRTGHALVPAAGRAVVRRASNGVKPATAR

SEQ ID NO: 3370 - protein, 466 aa, unidentified
  REGION 1..466: note = Table 20
MGDGEQRRPRRTKQTAGQSGVRRMVKLRLYPTPEQELVLAGQGHAARTLWNLLHEWYTFHAPQRWPSIAEADEAIRQARREIDWLSALPAQTCQQVLKLYVQAWQAARRGARRRPHFHSRARTRLSIDVPQAGAMKIARLNRRWGEASLPLVGRVRFRYSRELPGLGDQAPVGRVTGGRLVRETEGWYAAFRCAFQRENPAPGSHPGPAVGLDRGVAVPLATSDPGRPFVSHGPWLHPKERERLRRLERKAARQRRSAQRGQPASSRLQRTYAHIAELRGREKRRRADWHHKVTTELAARYGLVGVEQLNVRAMTASPRGSADRPSRRVAQKTGLNRAILSEGWSRVLALLDYKAVERGGVVVPVPARNTSLRCSACGHVDAKNRKSQAVFECTNPECGYGPVNTDVNSAYNIKTDAIHTYEWPRGLACLTALGSRVDGRSVPAWRRRRPRRWLQPNRQPNRVVTA

SEQ ID NO: 3371 - protein, 215 aa, unidentified
  REGION 1..215: note = Table 20
MAVGLDLGVTVAVATSDPERPFLTHEPWLNRKEEERLRRLERKAARQRRSAAPGRSVSRRLLHTYDQISQLRGRERRRRADWQHKATTSLAEPYGLIGVERLNVKAMTASARGTTAEPGKCVRQKQGGRTQRSRWTGTQAAALATAESSTEPSGCGTTCAAAWRAPRESPRRLHNYAFFTALESATINREAPMRAAGRAGPCRATASAPGAPARP

SEQ ID NO: 3372 - protein, 464 aa, unidentified
  REGION 1..464: note = Table 20
MSAPQVFSDARGCRRHVSLGVHPRFVAIVVTYANGHVRGVDDTAAVSELMVVKRCVKYPLAPSAAQSEVLARQAGAARALWNLIHAHHTFYEASRRWPSWSDSDAAIRQARKDIDWLAILPAQAAQQVLKAYQQAWLNYWNGTHGRPTWRTRRARHAVDVPQARDLNFTRLNRKWATVSIPKVGKVKLRLHRDIPERVTGARVVRESTGWMLVVRGENQVVKPRQRRVQRGSVGIDRGVIHTLALSDGSFIDQAATLAAGEKKRLYRLERQAARQRAGTLRGHKASRRLLRTYAQIASLKARQARRRYDFAHQATTALVATGMANLVVEDLRVKNMTRSARGTVEAPGINVKQKSGLNRSILNQGWNQILTLLTYKADQAGARVIRVRPHGTSQTCHRCGSTAEGQRESQAVFRCANPACGWTGNADTNAAIVINHRGQEVALQDVEPNAIRQAVKRQNPKTAA

SEQ ID NO: 3373 - protein, 453 aa, unidentified
  REGION 1..453: note = Table 20
MESGRRNYRFRVYPTPGQAAALERQGHAARALWNLLHAAWEANGFRVGLDWYTQEIKNIRKDAEYIWFADLPAQAAQAVWKDYFQAWRNCWNPEHPAKAPVFKKRHTRMGVDIPQASHFKPTRINDKYITVNVPLAGKIRVRLHRKVDFTQVTGAHLNRDGLGWHITLRTKTGPIIKPTAHKRAAIGIDRGVTVPLALSDGTNFWHPDFTTATERTTLLRLERRLARQETRRKKTNARTSNRQRRTREAISAINSRQTRRRKDFLDTASRKITTDYALVVLEELDIGNLTARAKPKPDPKKPGVWLPNNAAAKTGLNRSILNEGWGGFRRMITYKAAEHGGQIVTVDARYTSQTCANCRTRGIRESQAKFRCTTSTCHMFGITVNADTNAAEEIETRGTELASSDTTVATAPPAPTTVSIPPAKVPIESPPSVIGNSHLHQLHLEVHERYLRH

SEQ ID NO: 3374 - protein, 443 aa, unidentified
  REGION 1..443: note = Table 20
MKANTAARFRLYPNQVQAERLTAWSHTCRAVWNIALAQRIWAYKSARRATVRSVEQCIGLTEARKEHAWLRDLPAQCAQQVLRRLDTAYDNFWNPSHPAGFPRFKRKHHRQGVTFPGQAVQVRRVSRRMAHVKLPKLGWVRFRLSRPLGGAVRNATVSRDGLGWHISFGIHQPEPAQRPVNTGAAVGLDVGIACSVFVSGEDTERQRPDILTPGERERLRGLEQRKARQIKYAKKHNAGKYSNRLRKTIAAIAAVKARQARRRTDWNHKLTTDLAKNHGLIAVEDLKVSNMLRSAKGTTEQPGRGVRQKAGLNRSIADQGWFEIRRQLGYKTKRYGSELVAVPAVGSSQTCSKCHTRDPESREGCGRLFACVHCGHTDHADRNAAMIILARAFSTAGRKPTTAWEAGTAASGRGSSQSTRSPHGQGTRTGSRLREPSSNVTAA

SEQ ID NO: 3375 - protein, 266 aa, unidentified
  REGION 1..266: note = Table 20
MKLPKLGWVRIRWSRALGGTVRSATVSRDGLGWHVAFGVYAEEPDEQPINTGPAAGVDVGIACSVFVSAETTERQRPDTLTAGERQRLKGLEQRKARQLAFAKKHNGGRYSNRLRKTIAQISAVKARQARRRADWNHKLTDDLAKNHGMIAVEDLKVSNMVRSARGTVEQPGRGVKQKAGLNRSIPSHGPAVAGCSPAHTVGTPNTPTAMPHTPSSIGHFAPPDGNTPCGVRRASARAVAREYRARAVPQRGKAIPQRVAGRVNQP

SEQ ID NO: 3376 - protein, 424 aa, unidentified
  REGION 1..424: note = Table 20
MLAGRRYRLYLTPGQAEQATRASGCCRAIWNAALKQRELAWELRRERVWAIAQMAELPELKRAAGFEWLARDGIAQSLQQSLRDLDVAYRRWLAGRGGRPRFKAKGRRESFRLPQGRDLSVRKVNRRWAEVRVLKLGWCRFRLTRPIGGEIRHATVSRDALGWQISFCVALEQPPAKPNGGPPVGVDRGVAATVALSTGELHSCPGLPSGQAQRLRRLCRKAGRRETLRRRRPNGHRRRSRRHQRTLDQIARLKARDARIRADFLHKLSTRLASAHGLIAIEHLRVGNMTRSAKGTLAQPGVNVAQKRALNRRILAQGWGELRRELRYKAAWHGSVLVEVPAEHSSQTCSACGVVHADSRKSQAEFRCVACGHQQHADVNAARVILARAVNGQEDGGRIWPLQRGEPSRRRPGPRTANPRWRAA

SEQ ID NO: 3377 - protein, 437 aa, unidentified
  REGION 1..437: note = Table 20
MLSGRRYRLALTDEQAEQCQKFGDVCRAVWNAALDQRRQYVDRFTRGRRGPFCGYHLQTSELAEAKAEAPWLKEAPSHVLQQTLKDLDRACRDRGAFKVRWRAKHRWSPSFRFPAGNRIRVQKLNRRWSRAKLPKLGWVRFRSSRPVGGAIRSATLSRKGTRWFVSFLVEDGLLTPEHHPGTPVGVDRGVAVAATTSTGQFHDREFARPGEKARHLKLQKKLSRQKKGSKNRARTLKAMGAVSTRAVDRRGDFCAQLARQLTTRHNVVVLEELRTTNMTASARGSVDAPGKYVRQKAGLNRAILDKGWHRLEMALRNAARKSGTRIVLVNPAYTSQTCYPCRVVDADSRKSQAEFVCTACGHTDHADVNAAKNVCRAAGHAVPACGDFGVARSVKQEPPGTREEVPAQPALELAGNPRAHEVQGGSQPQHLGSWRHA

SEQ ID NO: 3378 - protein, 455 aa, unidentified
  REGION 1..455: note = Table 20
MSIPRKKGVLRMLAGRKYRLEFDSGQRAFAERLGGICRAVWNTGLEQRRDYRRRGQWLDYAEQCRQLAEAKKDPYCGWLADAPAQVIQQTLKDLDQACRKHGTWTVHWKSKAKWRPSFRFPTAQHLPVERIGRKWGRVFLPKFGWARFRMSRPLGGSVKSATVSRNGKHWFISFLVEDGIAEREEHARPGWVGVDRGVLTAAVTSDGEFFDRRHAGTGGVSSRQLPRETKQDRKDDVGYLTVGEAERYLRLQRRLARTKKGSKRRKTVVAAMSEVMRRVRWRRADFNAQAAHRLTRAYGHVVIEDLNTKGMSAAVKPKPDPDRPGRFLRNGAAAKSGLNKAILDKGWYGLEVALRSKARYTGSVIHKINPAYTSQTCPEPACGKVDEKSRKSQAIFSCTSCGHTEHADIVGARNIKAKGQAAGLVVSGRGDPPGSAKRQAPRSTARAAQAARAAA

SEQ ID NO: 3379 - protein, 498 aa, unidentified
  REGION 1..498: note = Table 20
MRGTTHKQARNSAKKRSRSHRKVQRGRIANRYRAYPTDEQFTLIKRFGGSCRFVKNLGKEQRDLAWKHGRHSVSYTSQSKEILDLRNDPEYGTWLHEVPAQVLQQALVDLNRAYQNFFDGNAGYPEWTRYSSWYSFRVPQHVELKVLSRRLAEVRIQGLGWMKIRYHRPIRGSAIKSATVVMEPDGKVFISILTEFHCRRPTKPLVEDWNSAVGVDRGVNVAVAIKDGLGNAELIDRDMWTPGEKKRLKRLERARERKKLAREKHNLEIVRENKERKVRDEAPLATLAKSKNQQDTERQIATVHARTRRRRKDFTEQVSTYLARNYRLSVFEDLNIKSMTESAKGTAKAPGRNVHQKAGLNRTILNKGWYALEHRTAEKQLRHGHSHLVIRAAGTSITCVDCGHLDKDSRVSQSMFICTNCGYQANADLNAADEIRKRGMKLAFVGGTPVTAHQGTNLGPTLVGAEPGAVGAGRGSGNEETDTSTAEAHDAKHVWTSQ

SEQ ID NO: 3380 - protein, 418 aa, unidentified
  REGION 1..418: note = Table 20
MLFPIGQCYTFQMIQRKANIYRLYPDAKQRLTLAGIAGACRFVYNLALEQRRDWWQRHKDRTGKAISFAGQCRELTDLRRDVDWLREAPIHPLQQALRDLDRAYQNFFSGRSGYPSPRRKGLHDGFRFPDPASLRVERIGKKTGRIKLPKLGWVAFRGWYDLPGAIRNITISRRAGQWFASVQWEREVPDQALSTLPAVGLDMGVSVFTAMSSSTTIAPGNFGKKALCALRKAQRSVSRKKKGSANRRKAVWRVQKLHARVANTRKDFLHKLSTTIAKNHGTVVVEALQVRNMSASAKGTAEEPGRNVRQKAGLNRSILDQGWRMFRTFLGYKLADRGGKLVEVPAAYTSQTCSVCGVTDPASRVSQARFVCATCGHTENADINAAKNILRRADCPLKPVEGHRIRRPVEAGSIGRAA

SEQ ID NO: 3381 - protein, 462 aa, unidentified
  REGION 1..462: note = Table 20
MSALSDGGAVRAVRSLGPTSRRAVSSTSWPRGRSRMGATIHRSFAYRLHPTAAQAERLRQWIGATRFVYNLCLEQRRDFWRQYRRQTGRHLTWAQQSQEVSELRRQVDWLADVPRDALERALRDLDAAYRAFFAGRNGYPHPRVKDARGVIQFISRDLAVKRLNARWSAIRLPKIGWVKFRDTRELRGRWLSVAVSHYAGQWRVSLAHEIARAVSTPVQSSVGIDRGVTVFAALSTGELIDGPNVGRKAAASLATAQRRLARKKKGSNNRRKARLRVARLQARVAAARKDFLHKISTGLAKSHGVVVLEDLKVRNMTASARGTVETPGRNVRAKSGLNRAILDQGWGMFRQMLAYKLEERGGYLLTVNPKDTSRTCSACGVVDADSRDGTRFACRACGHDAHADHNAAINILRRGTPLVPVELASAFNEAGTAIADADSPPRPLQKRTAPQPPSRDNAGGGG

SEQ ID NO: 3382 - protein, 415 aa, unidentified
  REGION 1..415: note = Table 20
MIQRGYRYKLKPTPAQDRLFSQCAGVCRLIYNLALEQRRDHWRAFKRQTENSISYPSQARELTCLRAEYDWIAAVSQTCQQQALRDLDRAYQNWFKGIARYPSPRKKGRNDTFRFQGREVQVRKLNDKWSEVRLPKIGWVRFRDTRQLVGKLNNATISLAPNGWHISFVLAIEHDAPASIAPAVGVDRGVANTLALSTGERLSVPASLEALEQRQRRAQRALSRRKRGSKRYAKARRRVAALSARRARIRKDWHHRTSLELSKRFGTVVIEDLNTKGMTASAKGTVAEPGRMVRQKSGLNRSILNQGWHIFETLLSYKLEERGGELIRVPAQHTSQTCSACGAVDSRSRKNQASFVCTSCGHFENADTNAAKVILRRNTASMFVEEGYWVSVEARTIGEAKGQTGNLRPSGRGRC

SEQ ID NO: 3383 - protein, 410 aa, unidentified
  REGION 1..410: note = Table 20
MELIRGQVYRLKPTTQQIADLEGTAGVTRLVYNLMLEQRRTWGQRHKLGRSTQSAEIKTLRAEFDFIAARAQTTQKHALNDLERAFQNFFARRAAYPRPRRKYLDDSFRHDGREVKVRRISRRWSEVFIPKIGWIRMRDSYGGKLAGMEKSIRTATLRRDASGWAVSFAVTCEFKVSATPLGQIGIDRGVAAPIATSAGDIYRLPAGVAHTDAAIRRAQKAMSRRKRGSRRYAKARSRFARLKARQVRRRQHMLHAVSRSIANDNGLVAIEALNISGMTRSAKGSAEEPGRNVRAKSGLNRAILASGWGSFATMLGYKLEERGGILISVDPKNTSRQCAECGHTAPENRESQAIFRCNACDHQAHADINAARNILARGINLKRRGNTPLLDAEGKALAPCEASTILSVAA

SEQ ID NO: 3384 - protein, 399 aa, unidentified
  REGION 1..399: note = Table 20
MIVARGMTYRLYPTQTQAEALSRFAGTCRAVYNAALEQRTHYWRPFLRAHGKHISFASQGRELTQLRASFDWIEACPIDCQQQALRDLDQAFTNFFAGRAGYPRPRRKHANVSIRFPSCRLTVKRLNRRNATIRVPKLGRIRFRLSRPLQGHVANATISRDPLGWRVTFVTHVEIDTPPAADRIVGIDRGVTCSTATSDGEMPFFPREAITVSEAKARAHQLTASKRCNGSHRRAKALKFAARQRARAARQRKHANHVETTRIARRYHTVVLEDLRIKNMTRTARGTLEEPGRNIKQKAKLNRSILDTGWGQYETLLTYKVAERAGTLILVPARNTSRRCPECGHVSARNRETQALFRCVECGHKAHADVNAAINILRAGTRPSRGESSARKSRAAPAT

SEQ ID NO: 3385 - protein, 301 aa, unidentified
  REGION 1..301: note = Table 20
MRLRNTFNLGRGIPAGQLRSATVKFEASRWFVTLLMRLPLSLPASTPVASVGLDYGVKHTLASSARTVLPAPVATNKEAQRILFLEHRLARCVPGSHRYAVALAKLNTFRSRITRRIHDWRHKTTTDLSKNHGLIAAEALRAKNMTASAQGTVEAPGTRVAQKAGLNRALLEPGFGILMQQLAYKQAWRGHAFIQVDPAYTSQTCPRTGCGHVHQDNRPNRDTFRCVRCGYTDAADFAAAEIILRRGKQTFSAVRTAPALAAGPGRDCAPGASAPRGHRASHSRTKPSLRLSTQAKGIPAF

SEQ ID NO: 3386 - protein, 289 aa, unidentified
  REGION 1..289: note = Table 20
MKYRKSRDLEGRITQATVSREVDGWFISILTTRVIETPELVTSPVEGIDVGVVRTMTFSSGAEPLCMPTLSAQEKAHRLRLQRRLSRRKRGSKRYESAKRALARNRAREARRRRDFLDKATTAIVKRSPFIAHEDLKIRNMTASARGSIDRPGTNARQKAGLNRVILEQAWGKAFRMFNYKTAAIGGAVLKVEARCSSQECSSCGHISPGNRPTQARFVCVSCGHSENADDNAAKVIAYRGEVLLAAKRKAAAGHAASGRGANVGLGAALPRRAVVTKRQPAQPAPCKA

SEQ ID NO: 3387 - protein, 596 aa, unidentified
  REGION 1..596: note = Table 20
MEYPDVVAVDLRKLPSGTKQALWRALQLQSRAYNWGVEHALGLHNAGEKIPSPRVDSGHLTLLRRHPENRKGGLRLQRGGFYQGVNAAKKWSKHRRSLTRGFAISVERVEITAKRLAETENSLPSDARDVLARLVETASEYASASSALVSELEGHPDLSHASDTVNAEPVESICEKFHARSEALVEEHKTLVPEARQQVTAHARNGACPKEVKALRSAVTKNANAVKKHDRSIKPVERHLVKGVKRLFRSRKDTERASGPALVFHDRCRIADGELVLPCGISLRLPRDRDGKPFAVPARMKWGGAVHVVDATDEAGRVTRRTKPRHRKYRVHFLCKSYADAPTEPTDRSQTLGVDWGIRNPLVCSDGTSYPKYASSQQEDQSRKRHHRSKQLQKSMSQKQEGSRRYRKQKRQRNKLIVKNTAVKVNQQFHNAKHVATKPGVRSVAAEDTKAKNMTKSATGSKAFPARSAGKRGLNRVLAETAPARMLRFLARAMVKHSVGYVPVYPAYTSLTCFVCGKKGTRETQARFVCSCGNRAHADLQASLNINARGHPNLYPPTGGGRDSRRKILDDAMGIFERSLASTEVSRTNTPVNPGI

SEQ ID NO: 3388 - protein, 549 aa, unidentified
  REGION 1..549: note = Table 20
MFDERVRVSSDCVVLPDGVRLRTVHAPELPDDGRVWQWTGAAWVVDVTAKITARARPEHRRYVVHLSAKADTPEPAVPQSPDEIVGVDCGVAIPVATSTGEAHHLPEYKALQAEIRTLQRAKARCDYGSRQWKKRTRRIRALNKRLHNLRVDGSRQIAAQVAKSGHAEIAVEDLKLKNMVASAKGTTTHPGRNVAAKRGLNRSLHRVAIGRLHQHIERACHKQGLSFSKHPPQFSSRKCHRCGGIGKRETQADFRCPHCGWAGNADHNAANNIRILAWERRQGLAAESRNGPEGNQRPAQTNIRRPPQAPRYISPLRIVALSAAHLEETVAEQPVTVTVRPDGPYIVSGSAPLRVRRAIMSEHGEALTWQSEEASEQNPVYALCRCGESSRKPYCDGTHGNVGFDGTETAPTDSFRERCAELGGTGIEVTDDRGICVHAGFCGNRISNVWSMTPETDDSVVRAQVMAMIERCPSGALSYTVDGAEIEPALPVEISVIADGPLWLTGGIRVERSDGEPFEVRNRVTLCRCGHSAQKPLCDGSHKEAGFTG

SEQ ID NO: 3389 - protein, 520 aa, unidentified
  REGION 1..520: note = Table 20
MTTRDASIDVAAAHRLDPAGREAPGVSQQGAAVSASTVRRMAPDPSDGARGAAGGPVGLVAFKFRLYPSPEAARLLERYAAAERAIYNRVVEYQYELRALQQRRRRHGGRMGLPRAEFDYSDINAWAKAEAPWLVGIPGSVRSQAERIAYRALVDSLRLQGRRQARFRRRGGGTDGFSWQAATASGEVRKINKRWHEVRLPRARCAPVVWCRVRVDTGREPPAAAYRAGKVLRITRDAAGTWWLTMTAPAVPERAAPAGSSCGLDLGVIHTLTLADHTGRVLHLKMLRPLSDAEARRLVDLQRSQSRSRLANPCEQPPCPHTSGSCWRTSRRYQRRRVEIAVLRRRARRRAHDWIENVTTRIADRYHLVGVEDLSVRALTASAAGTVAAPGRNVAAKRSLNRGIREQRWATILRRLDDKVTARGGQLMRVRAANTSRRCHRCGHTAAANRTTRALFCCVACGHRDGADANAAQNIHDLALQGHPPARGGTATAPTGATPAETDAEARPEAADDASIAPAA

SEQ ID NO: 3390 - protein, 489 aa, unidentified
  REGION 1..489: note = Table 20
MSQKVRIIKVRHAGTSVYLGDDSCRNHCWTRNPERIMDWLCDGWRTRFNQHREHRTIRRYMEDMESRERMWVDVPLGGATVGEPFKDSEARIRCPWLACIPSAILASPMRVENSEWYAALKRKKINGGRVPGFKSRKRDPQYFVCWRNQNKTGNAVYHQVSRKRGVVVITGSVKKEFRKPGETGCRWMLSIHVRVSQPVRDYTSVAVNWTERTLAFTNEPSPIRRNATGKQTGIDRGCVHTLALSNGTMLDMPQPSERERREYLRLQRKLARQDMTNSRRGGKTSKFQSKRRKLTLKRMSSIRRHINNRKDDWVAKTTTRLVEDYDLIALEALDTRQMTRKPKPKQDPDHKGRYLRNGSAAKAGLNRSILGNRWTDIQNKLEYKTRLAGTRLILVNPAHTSQTCNRCGHVAKENRESQAVFHCVNCGNCGNKDNADINAAKNILDRAMHTTGMDDAEGVEGHASRETRVSREGSIETPTPATRTGRPLQ

SEQ ID NO: 3391 - protein, 483 aa, unidentified
  REGION 1..483: note = Table 20
MSQKYRIRAVKFDGAAVYLGLSPSGNPMWTRNPMRVMEHFASCWQAVFNGMRAYREEWEFKDGVKVGSHPLGSHTDQPMASTVGQMRERMPWLASCPTLLLHSAIRHENIDWYAGLKRKKKLGGPVPGLRRRNRCEPMFMMFARNGKDIAVRYRVVNRRSGCVEFNGMTPKDQRKPGDKAHWRIRIFIRLSEPVREFTKIIVHPSRNTIVFVNPVIARHGIPDQRDTIGADRGCKVTMALSDGRMLKIPQPSKRERRRLVHLQRRMSRMDLQNKANGMRSVRDSRRREKLRAEKNRLETHIRNRKHDWIEQQTTSLVLTSNRIALEALDVKRMTRRAKPKPDPNHPGQYLHNGRKAKSGLNQSILSNNWGEIRQRLTQKASLYDTIVKEVNPAYTSQTCSQCHYKDRNNRKSQALFHCLNCGYTDNADHNAGANIRDEAFNTPDEGSRRGGIHRTQPGRMSPPSPEEPMKRRSQATSNGPKTR

SEQ ID NO: 3392 - protein, 464 aa, unidentified
  REGION 1..464: note = Table 20
MTASQPRSLGGDCITVKNEEGITTSQKVVVLKYEYAGSPMFVGFSPSGNKTWTCNPEKVIAHFCDCWRRLHNSQRAHRERRIYRAGERISGPLGARASTTPFFTAAGAARSHPGNEYLMFLPSLLLKACIRHEDTEWFAGLKRKKTAGGAVPGFISKSHDPVFICLANRGTHEPYITFEVVNRRKGVITFGGDAPKDWRKPGHEGERKWRLRIFVRISEPIRPFTSIILNNHKRTVSFVNKPVKRRNVPKRRNDGIGLDFGVRNTVALSDGTFLHIPMATEREKRRRRFLQKKLSRQDTRRRGCSHRRNTTHAKMAKLDRRLKQRKNDWIEKTTTDWVLDNRIIVMEDLRIRDMTRRPKPRIAPHAPLGYLPNGKGRKSGLNRSIQSSKWGMIRSRIEQKGELYDCRTIRVDPRHTSITCSVCGGRDVKNRRSQSIFECRNCGYKANADTNAAIVIRGLGMRAG

SEQ ID NO: 3393 - protein, 540 aa, unidentified
  REGION 1..540: note = Table 20
MSQLVRITDVEVVGAPVFLGYEGVVGEDGGRAPVWSSNGLVVLRWMRDSWRCRWNQSHTRRMKYAPAPVDADPADVVETSFGRAVLVPVTSDSHVDDWSDSQARGECPWLRSLPAMVMQSAVENENRAWWAAVGRNRTLVAAGRPRQPMPGFKDKKRSDSFVCFSNKGRNAVLTRFNRRHGVVTIKGQNRAMDKAPGATCARWELRIHVRLSGKIRDYTSVIVNVKRMTLSFVNAPEPVKREPTGAVIGLDGGVAHTETGSDGSFHDLPVETLEEIDRAIRRFNRDLARKRRANPTNYRASKRYQAKLRELDEAYEKARNIIVDWQQKLSTFLVRNYDVIGMEDLPIRNMTKRPKARFDESTGKWERNGRAAKAGLAHSLLRAALGRLRSMIDYKAKATGTSTLVPVAPQYTSQRCNECGYTDPGNRESQAVFECRSCHYTCNADVNAARNIEELALAQLEAGVPLRYTRNGDIEKVPPKKKHDDQPGNPGNGENRPGVDDAGRGAGARRGKGDTRPALPAMKREPDGTGCVTAGPATHR

SEQ ID NO: 3394 - protein, 479 aa, unidentified
  REGION 1..479: note = Table 20
MSQKVVITRVSLRGAAPFIGLTNTGTPTYTRQPERVMEWLCDGWRYRFNAFRSRRKKYGPGKALIPLGTPDTRTLAQTRQDEPFIAAIPTLVAESAEKIENTQWWTAIARRETLRKKGVKPGKTPGWKRRKDGLGFVCWYNGGRNARLHRTGRKTGIVTITGQNPPRHRDTGVRFTIRIHITLTQDIHPYTSVNVNWTRRTLTFTSRPTESTRTPTGQKTGIDRGAIHNLATAQGEFYDLPTRRLATIDRKIRTHQKAMARAVKTAGYPTQREYRKAGVSKRFAAHDKAVHNLHAKAARIVTDTQHKATTQLVRTYDEIAVEDLNVTAMMRRPQSIPDPLHKGRYLPNGRALKRGLSRSIASARISQVATLLEYKAHAAGVTIHHVPAYYTSQRCSECGVIDRRARENQACYTCRNPQCANYRVTVNADTNAARNIAWVAFHNHGRGLSPGVEGMSDGTGELSHCPQSPRSANLGKLLH

SEQ ID NO: 3395 - protein, 482 aa, unidentified
  REGION 1..482: note = Table 20
MKYGIIMGMSQKTVIERVDVQGAHIYLGMADDGSPMYSNDGNRVMQWLCDAWRFRFNANRSNRYIINKNKEKKPLSEHPDTRTVKTMRVECPWIAAVPTYVIQSPDRIENTQWFAAIARRKTNITHHRKAGRMPSFLSRKHDDHTFACWYNNGQNALFQQVNRNHGIVTIKGQNPKDYRDHGTRFTIRIHIRVSQPIRPYTGIRVNWTKRTLVFTNTPLPIKREQTGMAVGVDVGVAHAAAQSNGMFLDLPKTKLAKIDREIRRRQRAMARKANLSGKTRRQYVRDGVSQRYARERAKVADLYAKKHRIITDCYQKYTTGLVRDFEIVCVEALQTANMTRKATPKPDPNTPGHYLSNGQSRKRGLNRSMRNNALGMLRSMLEYKTKLEDTCTLVQVNPAYTSQTCFQCKHIDPRNRESQAAFQCVNCGHEDNADTNAALNILEAGLQHLASTDGAWHGISVQDMLNTLRGQHATLPCEPQHA

SEQ ID NO: 3396 - protein, 492 aa, unidentified
  REGION 1..492: note = Table 20
MSRKYRITRVDITGATPYLGHGRQGAPVWSKDPDRVMGWLCDAWRFRFNQHRSQRSRYLIGTHAPDGLLEPLGNMDTRNNRETREDYEWTSAVPDLILLSPWMMERKEWFAAVKRRDTNLKHGRKPGRMPGFKRRKQGRRFTCLNNHGKGYKVVVFNRKHAMVVIGGVNPKQHRPDGARFRICIHFRLSRPVLDSTSIHVDWTRRTISFTHPNPPRPHTPTGAATGIDVGSVHEAALSDGRLLDLPKERIRYVDKRINALQRAQARCVRESPYDDAGDYLKHGASNRYRRLGRRIRDLNAYRMRLIVDRQHKISGMIVDEHDLIVMEALQTANMTRRPKPKPDPDRPDHWLPNGRNAKRGLNKGMREAALSRFRSMIEYKAREAGVTFLTVNPAYTSQTCSRCGHMAKENRESQAVFHCRSCGYEGNADVNAAVNILTKGLGTPDMDPVENTLSGRDTSETRNRSIRPSTGQAEPTAVSSRRETTVVPGNTR

SEQ ID NO: 3397 - protein, 479 aa, unidentified
  REGION 1..479: note = Table 20
MGWKLKITKVELTGAPVWLDRGECGFPEYSTDPDRVMRWLCGAYRYRFNQCRSLRNRWCWDDKTLLEPIGRQVDDRDITSTRAGEAWLAGVPQRLLETADRLEQQEWFAAAKRRKTLTGQGVDASMPRFRKKKSDLRFSLFYNNGRGFDYTSFSRKHMIIVIGGQNPPRHRALGVKWRLIIHVRRTKTMPDTFTSIHVNWNHRTVSLTCPVTKREHTKTGRSIGLDAGVTHTQTDSDGNFYDLPTSELTRIDELIKDVQRQSARCVTASKYKTVQSYRQHGASKKYIRLMNQLRGLYARRKRIIEDWEHKLSRCLVDGNDLIIVEDLAVKNMTRKPKPKPDPEHPGQYLPNGAKAKAGLNKGILTASWGRFHSMLAYKAEHAGVTFMKVPAAYTSQRCHVCGYVCKENRESQAVFSCKHCKWSGNADVNAALNILHDGKETLLNTAVSGGTRPKRETIPPKVDLTPQGSPVNGIATLRA

SEQ ID NO: 3398 - protein, 492 aa, unidentified
  REGION 1..492: note = Table 20
MSQVVQITRVSIKGATPYLGDKQGDSSQPIFSSSPNQVMEWLCSAWRTRFNDHRSQRKKYGKDKVLIPLGESIVNMTDKQAREERSFLKAVPSLVLQSPEQIEAKECLSSAKRRKTLKESGRNPGKMPKFKSYKKHDHTFVCWFNGGRNARFDKVGRKTGIVSITGMNPKGKRRSGDKGQRFIIRIHVRLSQEIRPYTSVQVNWTKKKLVFINEPLAVASRAQRGQGSAIGIDRGIVHMTADSQGYFEDLPWDTITSLDNKVRRLQRSQERSAKDLGFGSSHAAKKSGKHSKSSIRRDKEIAKTKAKISRVVQDAQHKVSRSLIEDHDIIAIEKLNLAGMSKKAKAKVDPHNPGEFLPNGQSAKKSLNRKLRLSALSQFGEFLQYKARLSGGQIIEVDPKNTSRRCSSCGHVAQENRESQTVFLCKKCGHSDNADHNAAINILDRALRDHDEEITDFWGGKHPSVRAYQSDPRGLTAGQRSPSIRKPICPST

SEQ ID NO: 3399 - protein, 569 aa, unidentified
  REGION 1..569: note = Table 20
MSQRVKITRARLHGSAVYLGDVTGPDGAQAPVWSADPDEVLAWLCDGFRFRFNQRRSTRCRYLTCEDRNGDRVIVVDPAGEPVLVPIGRTVTDITDAQARRRHSFLAAIPGYVLEATLKTEATDWFSAGKRRKTNKAAGRRPGAMPGFRRKNCDQRFVCWFNGGRNAVFIKTGRRSGMVTISGANPRTHRTPGRAANGKPHKLGWKVTLHVRLSQPIRPYTSVRVNWTRRELVFVNEPLPVTDRARTGEVIGLDRGVVHTAADDRGRFYDAPDTAGLHKQRKFHQRRMAKSKVIAARQGRRFSESKRYQAHKRAAAALAARQARIRDDFAHKLSTELVREHDFIGIETLHLDRMTRRGKGKGAAAKRGLNRSMRNAALGRLATCIEYKANLAGVAVVEVPAAYTSQRCHQCGHTAAENRESQAAFRCKACAWRGNADTNAAVNVREEALTRWAAQTEQLAGTSGENPGGHHSRQPGGEQERDRPPHGSGPWAGGICDEPQTTQRRLTAKGIHRFQAVEDVKVCTPVAAAVHDAAGAVRRADQGPAGPELAAATPAVPRWDFFVASPRPT

SEQ ID NO: 3400 - protein, 438 aa, unidentified
  REGION 1..438: note = Table 20
MSFRGVPTYLGEHNGTPLYSGNPEKVAGWLCDAFRTRFNQHRSQRCKYVYQDGQQLLDLNGDPLLTPIGSTVTTVTDKQARQQFPHLAGVPSLVLQAPERLESTEWFAAVKRRKTVGGKLPGFRSRKRGDKRFSCWFNGGRNAVFHRTGRRSGMLVISGQNPSTVSCKGRWELRIHVRVSQPIREYTSVQVDLSSRKVLFVNAAPTVNRSTASGVVGLDRGVAVTVATSDAEMFTVPETPELDAKVVSLHRTLARKRRTNPNWKTSTRYREVRTACANTQRVRASVKTDAIHAFTKRIAENYETVVAEALTVEGMSRKGTGSRKATLNRKIRDARWTTLLRQLAYKTGGNIVVVNPAYTSQRCHHCGHIERENRESQAVFRCVECSHFDNADVNAAKNIKALHLQGWATPTSRTVKSTGVTAPVARSVKRKPPVPSTP

SEQ ID NO: 3401 - protein, 473 aa, unidentified
  REGION 1..473: note = Table 20
MSQIVRILGVKVTGSVFLGLNEDGEHRWSADPWRVAGWMADGWRTRFNQHRSRRHKYVYGHGDQACCDPLGRVLVPIGSRVSDLSDKDARERYPHLAAMPAYVLQSTERIEKQEWFAAAKRRATNHGKGRKPGRMPRFQSRKHGDSRFVCWFNGGRNATYQQTGRRAGLVIIRGQNPSAAPDGTRRWSLQIRVRHTQQVREYTSVAVNLTRREVAFTSPVAARDHQRSGRSVGIDVGVANTVATSAGSMHSLPDLSNHAADVVRHQKRMAKSRVVARREGRDFHTSARYRAHREAAAKAAAAAANVRIDWAHKLATALVNEHDLIGLEDLRLSNLTRKGKNKRSLNRLMLNAGLGRLRSFVEYKGAAAGIPVVAVNPRNTSRRCRACRHVAAENRESQAIFRCKACGHRAHADTNAAGNILDAAREAVASGAWTTASSTGSAAKTKQAQAGRARAMNRKPAAPWGRPLTAHQR

SEQ ID NO: 3402 - protein, 405 aa, unidentified
  REGION 1..405: note = Table 20
MEIFRRWNYRLEPVGSQADQFVRTGRRNRYVWNYFLGYMEEAYLAARSAGGSLAPITYPEMSRILTLLKAEQPDLYEAPADTLQQTLMDLRETQVRFFKKLAGRPRFRGYGHARFRFPNPKQVLIEKDWIKFPKMGWLRFRKSRVFEGSVRSLTVFWEHGHWWVSILTKCQVEIPPSPAGLPVGIDRGVSNSLALSTGQLLHFPVPTDREERFHRFLARSVSRKRKGSVRRTRALGRLNRLRRRVTDRRRDATHCVINRLVRETPVVVIEDLRLRNMTRSAKGTVAEPGRNVRAKSGLNRSLLKQAHGEFTQILRYKSVRSGVELIEVPPHYTSQQCSGCGHTAPENRPSQARFRCVSCGHEAHADVNAALNILAAGLAVTAQGGTALAARRTANPLKMTRRTAA

SEQ ID NO: 3403 - protein, 447 aa, unidentified
  REGION 1..447: note = Table 20
MGHYAYYLRTDATQSQSETYFRYAGGCRFLYNLALEQRNLRYFEGPLPTMLELARAKEARDALRKAGIKPKRKESAPPEKGDKKEVVHKITYASQSAEIKILRSAYPWLNDIPFCCLQETLRNLDRAFVNFFKNKSRYPVFHKKSGKASVNFPPNRINIKELSDKAGGTEGLYCSKFRVVKSKIGEDVGLLNVRTDRPILGIPKSTTLKFEGDGHWWLSITTEQEIKKEKAKPGKIGIDLGVVRWIALSNGLTLPVEDKHIKTVFRIYYLREKLKRALSRLDRRKVRGSNNFKKEQVKIRSLKWRIAKATESVIHEMTDYLTKNYDYIAVEALRVKNMTASAKGTIENPGKNVKQKTGLNRSLLEKCFGKVVEQIIYKAEWRGGEVHKVNPANTSITCSSCHYTNEKNRIDQPRFLCKKCGFSMNADENAAKNILRLALDESALLTA

SEQ ID NO: 3404 - protein, 426 aa, unidentified
  REGION 1..426: note = Table 20
MHVNKAYRFRIYPNKEQEVFFARVAGCCRFVYNLGLEQRRVFGRPGRGFTYITQQNQLPALKKEAEWLAEVPSHTLQMALRALDRAFVNFFEGRAAYPQPRRKFENDSFTFPDPNQIRIDFGRSLLILPKLGRTKRDNGPVAIRQHRRLKGTLRSVTIAREGEHWYASILMRVRVKAPTQRRDNPVGVDRGVDVPFMTSDALALGQETETNRMRERECRLARTVSRRKKGSRNRAKALNALRRHKSKMVRRRRNATHKATAALAKNHGIIVVEDLKVANMTASAKGSVETPGRNVRQKAGLNRSILDKGWGEFVRQLEYKLGWTAGVLIKVDPAYTSQTCPACGVVDPASRITRDCFVCRSCGHADHADVVGAKEILRRGLEKLAAQGIILPGGGHPLAACGELGVTRSMKQEETANRLEILEVAV

SEQ ID NO: 3405 - protein, 429 aa, unidentified
  REGION 1..429: note = Table 20
MRLIQAHRFRLYPTPAQEEFFRRTAGCCRVVWNLALEQRQTYGRRGRTIAFKAQAAELKDLRREVEWLAEAPSHCLQQTLRDLDKAFARFFSGRAGFPRFKSKHRGEDSFRFPDYNQFEVGPDFVDLPKVGKVSMRAHRPVQGQVRNITVSRDGDHWYASICVSLRRRVRQAPTGTAVGLDLGVAQPIVQSDGVTHDLPRVTPEEMRRKARLQKGLTRKKKGSRNRAKARQALARFEAKLRRRRQDGLHKATAVIARSYRLVVVEDLKVRNMTASAAGTVEDPGRNVSAKAGLNRAMLDVAPGTVRRMLEYKVKRHGGKLVAVDPRYTSQTCSCCGRHPKDSPETAHLPHGRVSRDRFVCPLCSFACDADVNAARNILVRGKLAINDNVDDLIVTAGGSPVAACGALGTGRAMRQEAKTRQPNGLPQAA

SEQ ID NO: 3406 - protein, 422 aa, unidentified
  REGION 1..422: note = Table 20
MLIRRAYKFRAYPDVATADALVRGIGCTRLVYNLALAQRQMFGRRGRRLDPSAELVALKRDFPFVKEDAFSQCLQQALRDLDAAFQAFFDGRARYPTPRRKFVDDAMRFPQPYTKAGVAIVLGRDSIRLPKFGWLSIHRHRKIKGRMRNVTVTREGERWHVVIQTEIEVRDPQLRVDLPAIGLDIGINRPIATSQGETIALPQMSRQENTKRANLARALSRRKKGSAGRQEAHQKLQRFDRHIADRRDDARHKATTRLTQSHGLLGIEDLDVRAMTASARGTAEAPGRNVAQKAGLNRRMLDVAPGEIRRQLTYKAGWTGRIVLAVRPAYTSQDCSACGVRGHVARGERQFACDACGARIDRDTNAGRNILVRAILEHGRRTGGDSPWIEPHQRPETGMPKAAMIAHIAMQAGRSPRVQAGE

SEQ ID NO: 3407 - protein, 482 aa, unidentified
  REGION 1..482: note = Table 20
MLIHKGFRYRAYPSPAAQAMLARWFGCARVVHNLGLDQHRMFSRKGRSFGYTKQTADLPTLKAEFPWLAECFSQCLQQALKDLDHAFQCFFTGQGGYPRPWKKFEDDSLRFPQMTRTDAKTGEVVDMVALTRDGIHFPGGLGFIPVCFHRPLEGTPKHITLQRQGLTWWVSVCCEIEVTTPRPLGHDTLLKGFTGVDFGVANAYTRADGHVYAVPGETDGEAKRRLRLERRIARAVEARKAYGRINRSRREMKLRESLRALDQRVRRRRDDALHKITSDLAQNHGLIGIEDLRIATMTASARGSAEAPGRKVAQKAGLNRGLLGNAFGKFRRMLTYKAGWYGAAVVAINPARTSQTCSECHRHPKDSPETAHLSHGRINQAEFACPLCGFACHADVNAARNIERLATREFIRRVDSGESAAKPAPAKRKKTLSGLSAKPKASPDASRTRDQDPAGGRPVAARGARGVGQAKNRDVSVSRKAG

SEQ ID NO: 3408 - protein, 411 aa, unidentified
  REGION 1..411: note = Table 20
MQLLKGHRFRLDLAESQTEFCSRTAGICRFVWNLALEQRSMAWKHGRHHAGYNAQAGELAELKGLAPWIAEAPHHCLQQTLRDLDTAFQNFFAGRAAYPTFRKRFQKDSFRFPDPKQFKVDEVRQQIKLPKLGWVPYRNGKGRHALKLHGTIKSVTVAREGQHWFASILCEAEVAEPVPVLGPAVGIDLGVAQAITLSSGQEPIQIPGMTKAESRRLARIQRAFARKQRGSINRAKARTRLAEFQARIARRRRDAVHKATTMLAKSHSLVVIEDLRIKGMTKAPAARPDPEQEGHFLPNGAAAKAGLNKAILDKGWGEIRRQLEYKCRWYGSRLVAVPPAYTSQECSACHHTEAGNRTTQAEFLCLRCGHAENADTNAAKNILSKGTADGPSVSACGARASVGRRSRKVAA

SEQ ID NO: 3409 - protein, 415 aa, unidentified
  REGION 1..415: note = Table 20
MITNRAFRFRLRLDADQESLAIRTCGITRVVRNACVEQRAQWGQRHRISKFDQQAELKVLKSEFPWIAEAPHHCIQQAIADVDTAFQRFFKGEAGFPQFHRRGRKDSFRFPDPKQFTVGDTWIRLPKFGFVEWVRHRDIVGTPKTVTVIREGNWWFASVLCEIDEVRPEPGSADYGERLGIDLGVAVPIMQSTGEELPIARTPPRETRRSRKLHRQLSRQQRGSANREKTIRRLRALSAHQARRRLDAAHRASAHIAARHSHVAMEDLRLLNMTKSAKGTIEAPGKKVAQKSGLNRVMLDMAHGQLKTLVRHKVLARGGTFVLVDPRNTSRRCNPCGHISAESRKNQAVFQCVSCGHQANADHNASENIRDRAFGSGVPMQGKTPTGGLPGIACESSGIARRKQEQSSPETALAA

SEQ ID NO: 3410 - protein, 436 aa, unidentified
  REGION 1..436: note = Table 20
MYPTDDQEAFFGQIAGCTRLVYNTALVQRSFLWRQYQRAEGRSLSWYTQKAELPALKQAAPFLKDVPAHCLQMALFDLNAAFRNFFEGRAAYPKPRRRYEHDSFRFPDRKQVRLDSRRGLLYLPKCGYRKGNNGPIRCRFHRRIKGSLRSVTIVRDGNHWYASILYRVKVEVSEPINDNVLPEEVIGVDCGVAVPFMTSDGEALGYFVDPRPGAGRAKRAKRLQQQLARCRKGSKRRRRARARLAAFKAREKRQRKDMIEQASARVARKGKVVVLEDLRVRSMTASARGTAEDLGRNVAAKAGLNRAILDKGWGMFRVRLGQKLARKGGRLLAVPPGYTSQRCYACGHVAATSRLSQERFECVACGHEAHADYNAALNIRLLGLLRLGLADPNGFSAGTAVTARGAFGVSRAAKRECSLGSGGMPPELASSGCIAV

SEQ ID NO: 3411 - protein, 469 aa, unidentified
  REGION 1..469: note = Table 20
MLIRQALRVRLLPNTQQAQLMERIAGCCRAIGNVALDQRRWFARPGRSVSYASQAAEISELKAEFRWFGEAPYHCLQQALVDLETAYKNFWAGRTGAPKPRRRGRDDSFRFPDPAQITLSGNLHVTDKRRTRSIKQAVLSLPKLGAVRCVLHRAIPAGSRLLSVTVSREAGRWAASVLTERDAPEPADRSSEPVVGIDLGVTQPAVLSTGEVYALPRASAGAAAHLARLQQRVANKVKGSKNRRKAVSRLAAFKVAQARKRRDAMEKATTHIAKNHGVAAMEDLRVRNMTASARGTVEEPGANVAAKAGLNRSILDVAPGALRVRLGQKLAATGGQLLLVPPALTSQRCNACGHTEAGNRPSRDVFACKVCGHTADADANAACNIRDRALGKWGGAAKGEVASSTALLLVQQAKPKRSFKKKQNEKQTTGGLPAQACPKRGGFLHAQGRKRAAATRSSGPQRPARSSVL

SEQ ID NO: 3412 - protein, 410 aa, unidentified
  REGION 1..410: note = Table 20
MKALKAYRYRVYPTQEQEMLFRQTVGCCRFVYNLCLEQRRLEWHRSDPRRLSSYDQIKDLPALKMEAPFLRDVPNHPLQQAIIDLDKAFKNFFAGRTAYPRFRKRGDRDSFRYPDPKQVKIEPNRIFLPKAGWVAWVRHRPLDGVPKTATVSREANWWFVSIQCEIDVADARPNLAPAVGIDMGIAKPMMLSTGEAVLLPRTTDQERRRLAALQQRVARRGTGSRNQQKARLAVARFQARLARRRKDAAHKATTRIAKNHGVIVVEDLKVRTMTASAAGTLDEPGRNVRAKAGLNRSLLDVAPAQLRSMLDYKAAWHGSRVVAIPAAYTSQRCCRCGHVDADNRVSQSVFLCQACGHVENADLNAAKNILRLGLATGGPPELACGSNRATGRKQERRVARRGSSALQSRK

SEQ ID NO: 3413 - protein, 244 aa, unidentified
  REGION 1..244: note = Table 20
MLESKVEMAPPNGGKVVGIDCGVANLAALSDGTVIKNPRAWAQAEVKIKRLQREVSRKKLGSANRRKARARLARAYAQAANLRRDALHQTTTTITKSHGKVIIEDLKVCNMTRRRVGSGRAAKAGLNRVLLDASCGEFRRLLVYKAQLYGCEIVVVPPAHTSQRCAACGYVDAGNRQSQSVFRCLSCGHEANADLNAAVNILVAGSCPDTLNACGVDGRRWSPLVSAQFAMKQESAVASHSLPL

SEQ ID NO: 3414 - protein, 494 aa, unidentified
  REGION 1..494: note = Table 20
MLLQRAARFRLYPTREQSARIEAWEYGLRWLWNAMHAEYVAKWETGYLAPTAKRQSYTLTMLREKVPFLAELPRNVSMQLLHELDRAWQRFFKGLAERPRFKSRRRGELAPMIEPHPALFSVQGEGRHAAVKFPKLGSVRAIVHDTIHGEPKTCALVREGGAWYAAVSWVAEIADPAPSTDPAVGIDRGVVNLLADSDGRRIENTRPLQKSQCALRKAQRRASHTRKGSKNRARANQRVGRIHRRVSRQRDAVLHRESKRYAENQGVVVVEALRLQNMTASAKGTVEAPGTHVAQKAGLNRALLDGGLGRFVALLTYKAERTGCRVVEVDPAYSSQECAECHHIAVLNRPSQGEFHCVACGHRANADINAARVLLNRGMHGGEVCGGDGKARPMKQKLRAAKRAARSEAQGALVANTNAPCFSSGWHYSQRPPGTFVRPAATRSFQHSVPPSWGTSAMVMQPSTGHTSAQRLHPMHSCSSTTGTRSAAGSPGAV

SEQ ID NO: 3415 - protein, 436 aa, unidentified
  REGION 1..436: note = Table 20
AGLARPAGEKRYPSFYDQKKEATLLRAEVDWLADVPANVCQDLLQRLDRAWQRCFDQGARQPHFKAKGHDPVSLCEPGKKVWRLEQKHGRHVLIFPKLGYVPIVLHRPLEGERATATITHEGDQWFVSIVCHVEVADPKPPLGPPVGLDRGVANLVADSTDHLEPRPAFLTRAEAKIARASQKLSRTKKGSKNRAKARAKLGVVHRKVRRQRENLLHTLALRYAKNHRVVIVEDLKIANMVRSAAGTLEEPGVNVAQKRGLNRRILQMGWGQFVTLLEQKATRYGSTVVKVPGAFSSQECAACGHVDAASRPTQDRFECTGCGHQDHADLNAPKVLVKRYEESTRRTGGGEVCGGDSVGRPVKQKRRSVRTTTPSRNARGQRPVVHGGDGLPRLPVVAREAAEPGRVEVGEVRPRAAPGEQAHRARLGARVHHQAT

SEQ ID NO: 3416 - protein, 401 aa, unidentified
  REGION 1..401: note = Table 20
MLVRRGFRYRIYPTPEQEARLRCWEGALRALWNLAHEQRRVYLSRGARCPSAFDQINQLTALRADVPWLADVPRNVCAQLLVDLDAAWQRCFARLARRPRWKKKGRDTVAITEPHPKTFRLTETGVVFPKLGEIRAVFHRPIAGIPNRCTIVREVDQWFVSVQCEQDIQEPEPTTRPAVAIDCGVANLLADSDGGLVPNPKHLEAALTRLARAQRVVSRRQKGSCRRERAKRCVAKLHRKIRRQRQHLLHVLSHRYAKSHGVVIVEKLNVAGMVRGGLGRQISGAGWSSFCSMLRYKLEATGGTLVEVPAAYSSQTCPACGTIDAASRHGERFRCVGCGHEAHADVNAAIVLLSRRNGGDAGRGGQGAIRPPMKRQLRVVRRGHSTVQVSGSFKSPGLQSG

SEQ ID NO: 3417 - protein, 197 aa, unidentified
  REGION 1..197: note = Table 20
MTGWLSRPERRYGGGASPMTTSSEHNRGYTDVVRAVDTGSRDAPHSPIISTASGSATGMNVIGSRPNWSDASDFAAEELTIKNMSASAEGTLDDAGKNVKQKTGLNRSIRAQTCGILRQQLTYKAAWAGRELVVVDPKFTSQRCSGCGAVFAEHRQGKRYECADCGMIEYADVNAALNILHEALTGGTFPVAVSDAA

SEQ ID NO: 3418 - protein, 451 aa, unidentified
  REGION 1..451: note = Table 20
MQQYARLREWRLHLRNLRNACLQELIDSYRAARASALRRGRDRPIAEDWIRVRAEEIRDFMVWQERAEPDLRRRHAQAEQRRIERLRDLMTAGRNVDPLDRNVRPWQLRTEKDFGRPISKLDQKRRLADIRAADPEGIGHIPLEILRDQVDIVHRAMDGFFRRLKAGEKPGFPRYKSYERVRSLGCTLGEGIQLKKGRLFAPMLWHGGLEITMHRDLPGKPRTVRLTYDGRFWHVTIACEVDVAQVAHAKPGSACGVDAGVNRLLTYDDGSFAENPRFGDAAAPEIRRLARRLARAKWASLSRHKARRALAAANRRLRNRRSTHRHKVALDLARRAETVYIEDLKLRNMTASASGTVEEPGTQVAQKRGLNRGILDAAIATIYTMARYKAASAGGRIIAVDPRHTSQDCSECGGREPGARRQERYRCSCGAALHADHNAARNILARGLLAA

SEQ ID NO: 3419 - protein, 572 aa, unidentified
  REGION 1..572: note = Table 20
MCYIACMGKAQTTYQVRAKVSKSGHILLNERLDEARFEYNATLEDRRRAYKLLGLSIKKQSAGVVKNREPLNRTLSELHRLEHELTKLEAADADKRKIEEARRAVSRWWRDWRDDRMKERWPSVAEIESDDGNHYYGKRSDTRRLINSGRILTETRNGKTLLPRRARVGIIERADFAYDGFFQRLTRGSTPGFPRFKGKDRFRTISTNSGAENYLSYNPQSRKGMVRIKGFPTLRFMSKRELSLDEQGKVVQPSQISITRKRTGVYLSLTYPVDVEPQREGMPHAPIGIDRGIHALMAFSDGRLSIPGLNENAKARRKRKRKAQRKVNRAGVAKDGKGGKQVTCGKEVRRKRNRGNGEYIHFTNGRRKAVEALGRVSERDTLGHRQRLHRYTSEIVKSSDFIAVENLNIANMTKSAAGDADNPGKGVSAKSGLNRSILEQGWGYIAQMLEYKAGRAGIPFVKVEPAYTSQTCAVCGVIDAASRRKRRFDCVACDYENDADINGAINVLSRALVERYGRGEAQPLIERLIPWESGKNALRGNDDSARLKSKTEGLPECRRHAKGLPRGQLRLL

SEQ ID NO: 3420 - protein, 341 aa, unidentified
  REGION 1..341: note = Table 20
IATVYRECEDAVLRRLDIAMQAFFRRCSRGKTPGFPRFKPASRWKQIAFPHGNRALKFDTDQKRVRVPGVGEINLRKGRAVPEVFGRGWLVEKNDRWYLCVEHEVQAQPKREIQKIVGIDRGVHVLAATSDGALIANLAVAEKRKRATARLLRQLDARTVKSSDGRCLNRPDPVRIVAAKCLARAKEREANARRDYAHKVSRKLVDSTDCIGIEALLLVNMTRSAKGTVEQPGVNVRAKAGLNRVMLDSGFGLLQQMIAYKAESAGVKVVAVNPAFSSQECSNCGSCERGSRRRRRYVCLRCGYCNHADVNAALVIRGRAQLALLRMPDDGADPVRLYDAA

SEQ ID NO: 3421 - protein, 288 aa, unidentified
  REGION 1..288: note = Table 20
RALKLDERQRKVRIPSVGTVPLRKGRAIPDYGRAFVVTKNGRWYAVFECEREPVPQPPTGKLVGMDRGIRSLLVLSDGTHIGNPKQVERRRGAVERHQRELEMRTERDASRRVRNRQDPRRQAAVLRLARANEREKNARRDFLHKCSRTLVLEHDAIIIEALRVRNMLRSARGTLESPGRGVKSKSGLNRAIADAGWGMLVTLMREKAEYAVRTIVEVPAKNTSRTCAECGNVAKGNRKGAVFACVRCGHREDADVNAARVILARAQSALATSALPPGNTRLNQHDAV

SEQ ID NO: 3422 - protein, 515 aa, unidentified
  REGION 1..515: note = Table 20
MIRAYKFRMYPTSKQEALLRAMLADHRDLYNAALQERKEAWRRGKQVWFKDQDAQLTAIRSTDPDQARWSYSSQEQTLRRLDKAFKAFFRRIKSGEKKVGYPRFKGPRQFTSVEHRNGDGAKWASVPHPTQTRVKFQGVGHVKVKQHRPVIGSVKRLSAQREGKHWYVHLVVEQELPPPLPKTGAQIGLDLATGQNGLAYTSLGERIDNPRYGAAASEKIAAAQRQVFRCQQGSKRRLKAWDKVASLYRKARNQRHDYLHKTSRQLVVAFDLIVVEALRTGDMTRRSAPRPDGSGGYLPNGGTAKTGLNRSIRDAGWGQFLDLICAKAESAGRDFIQVNPAYTSQTCSACGHREQANRNGKVFLCVSCGHRDDADVNAALNILRAGLAPAGCGVTASRKARFLGEVTTLGKSPGRGSGHTRTGIWGPGAAASEIVPSEQAASHAPSTDPSTKEIPGLRFRFFPIGPDPALIFTVGRAKKNPARSSIILRTAGFSLVAPTGVDPVTFRFSVERSTN

SEQ ID NO: 3423 - protein, 421 aa, unidentified
  REGION 1..421: note = Table 20
MVSTTRAFVFRLRPATRQQVLLRAMLNDHRHLYNAALQERRDAWDTRTKRGITDPKDQFGKIGFAIQSAQLPAIRASDPDQARWSATSQQQTLRRLNKSFADFYRRCREGQTPGYPRFKPEKRWDSVEFRDGDGARWDSVPTGRDDSRRVYLQGVGHIKTSTHRPIRGTVATIRVKRQGDHRAHTRWVVIVTCNNVPLKVLPRTSRVIGIDMATGDNGLAYTSHGDRIDNLQPHKHAAQRLTRLQQQRSKTRRGSMPYRDLTRQLARAHARIARQRYDHHHQVAARLVASYDIICIEGLPVASMTRRAKAKPDPDAPGAFLPNGARAKAGLNRSIRDAGWGQFIAILKDKAACAGRQVIVVNPAYTSQTCVQCQRTDPASRSGKVFYCTGCGHYDDADINAAQTILCVGTGLVPEQPTRAA

SEQ ID NO: 3424 - protein, 485 aa, unidentified
  REGION 1..485: note = Table 20
MISSVAKAPRFGSGRAGGKLVVDGRDETVFRKAQIAFKPAGARQKRSLLALLDATRDVYNAGLQERRDAYRHSSQTRIALFDQFNQIKDLRGARDDVLVWGISPLRWALRRLDEAFGGFFRRVVAGETPGYPRFKSFTRWDTIGYDETTGWRLHLDAPTRPGNKAAARTFRPHLYVQGIGSIPLSKSAIRQLKRYATRGGVPTTLTLTRINREGTAWRASIGFKNLAVETPRMAPTAGSVVGIDRGVAVLLATAAADSYTDDQGQLLHHTDDLMTNLAALGSQIEELQRQRSSRKKYGRAWRQLSRRIRRLHRRQSNIEENWARHTAKALVAQHEVLVLEDLNLQGMTRSVKGTIQEPGKNVAAKTGLNRALAEAAPGRLARWITVKAESAGLGHRVWLVNPAHTSQQCSACGVIDAASRVNRQTYYCGACGWYEHADTNAARNIRARGMAAEKAWAAAGSPPLTRPKPRLRRRNPLQTAEPAAA

SEQ ID NO: 3425 - protein, 447 aa, unidentified
  REGION 1..447: note = Table 20
MISSRAKAPRHGGALLVVDGAGGRVHRKATFALYPTRAQEEKLHRLLRTLAEVYNAGLAERREAWRLRRVTVTLFDQYGQIKDLKGVRDDALAFGIQPVRTTLKRLDEAYAAFFQRIKAGQRPGFPRFRSHRRHNTAYWDEPISWKVRETDGRPVLYVQGVGDVPLSKHAGKQLARLQRRGGVAGTLTVTRRCAGTGHVWRAAVGFKNVETDALPATGRMVGVDRGVTVTAATSDGALSTYPAEARALRHRADRLGETLAGKKRGSRAWRKTIRQICRTRRRAANLVDNWARETAADITATADVIVLEDLQLKNMTKSAKGTVDEPGRNVAAKSGLNREMQAAALGKLATRIRVKAEEAGRRCWLVDPRNTSRTCPTCGHCAKANRPSQAVFRCQCCGHTANADVNAAVNIAAAGAQAEAAWRAAGSPQVPGSTPRMRRRKQQPAAA

SEQ ID NO: 3426 - protein, 365 aa, unidentified
  REGION 1..365: note = Table 20
SNAALEERRGAWTWERRSVSRYEQFRTLTGLRVVRPEVLAWGVTVCRGTLTRLDRAFAAFYRRCAAGETPGYPRFRSAHRWDSVQWDDASGWRLDTEARRLRLCGIGSLKIRIHRAPEGAPKALTVRREGRRWWVTVRCVDVPAEPLPPNGRRVGIDLGVEVLVATSDGELVANDRHARRSAARLARAQQDLVTKQRRSQRRRLAVDRVAAAHRKVRAQRADTLHKLSRRLVNHYDLIVHEKLVVPNMVRRPAPRPAGDGTYEPYGATAKSGLNRSIHDAGWGLLLAMIAYKAEGAGRTVIAVDPRNTSRRCAACGHVSVRNRRGTVFECQACGHAAHADTNAAVNILRAGLALREQSCEAEDAA

SEQ ID NO: 3427 - protein, 417 aa, unidentified
  REGION 1..417: note = Table 20
MYPTARQGRALVELLVAQRDVYNAALEERRGAWRWERRPVTRYEQFGQLSGDRDGFEWLARFGVGVARGTLVRLDEFFRRVREGQRPGFPRFRGAGSWDSVQWADTIGWNLDHHNRRGYGRLYVQGVGHIRIKVHRVFGDGAEARKLVVRRRGIRWEATVFWRNVQIPPLAPTGRACGIDVGVDVLAAIADDQGGMELVANPRHLRARQDKLAAAQRALAACTKTGRREGGRRNRAKARVARLHAKVRQARRDLAHQLSARLVRDFDLIAHEALDVEAMTRSARGTLERPGRNVAQKGGLNRSILDAGWGQLLCLITYKAASAGRMIQRVPAARTSQTCARCGHTSGESRVTRDRFACVACGHDAHADANSAAVILAVALGHLVIRAPSRERGVNCRPESGHQPVTAGRDAAPSCGS

SEQ ID NO: 3428 - protein, 679 aa, unidentified
  REGION 1..679: note = Table 20
MYNAALEHRRVSGIVKTISVKRKGRRWYVILSCDQVPAQPLPATGTAVGIDLGVVSLVTTSGGDHIANQRHLAASADRLAAAQQDLARKKRGSKRRRKAAARVAALHAKVRRQRLDGAHKAALALVPGYDVIAHEVLDVTGMTRRAAPRLDGAGGWLPNGAAAKSGLNRSILDAGWGVFLTILSHKAESAGRELIAVNPANTSRTCSRCGHCAKENRVTQATFACTACGHTAHADVNAAVNILRAGLALRDAAAEAAWREAAPRRERRSHLFSIPRDIGVAEVMCDHRRVWRRLGVLDGIRIGLLLLGLVFVATGLLPLREAEESLGDIAPLLVFLVGIIVLAELTKEAQVFDAIAARMAVFGRGNYTALFVLCTAFASFVTIFLNLDTTAVLLTPVMLALAPKARIAALPLAMTTIWLANTASLLLPVSNLTNLLGMEKIGLDAQAFAGRMWAPQLVAILVTMAFLWTFYWRRGERRDLRYTPPVLEPVGDRVLFAAASAACLLFIGALLAEVEVGVAAAAAALIVVAAFAVRDRARLTWNLVPWQLLIFVTGLFLVVPTLSRWGLADLMSGLLGDGHDPYRTAAVGAGLANAINNLPAYTAVEAVIPGARQDQLLALLVGTNVGPVVTPWASLATLLWFESCRRHDVAVPMGRFLLTGAGLAVVGLPLTVWALVATS

SEQ ID NO: 3429 - protein, 198 aa, unidentified
  REGION 1..198: note = Table 20
MKHIRADDPDGQRRWPKDGDGCRWDSEPRHPTATYVRLKGIGQVRVHRHRRVLGTVKTIGVKREGRRWYVVLSCDDVPAETRPGTGAVVGIDMGVASLVTTSDGRDLDNRRFLAASADRLAAAHRDLARKKPGSKRRGKGAVDPRHTSRTCARCGHCARENRLTQAGFRCEACGHTAHADVNAAENVLRAGLALREAA

SEQ ID NO: 3430 - protein, 525 aa, unidentified
  REGION 1..525: note = Table 20
MKTISVKREGNRWYVVLSCDDVPAEPLPAAGAVAGIDLGVAALVTTSDGVHVANPRHLAATADRLAAAQRDLARKRRGSTRRLKEVARIAALCGKVGRQRVDYAHKVANALVRGYDVIVHEELRIANMTRSASGTVEAPGRNVAAKSGLNRGILDAGWGVFLTILSHKAESAGRELIAVNPAGTSRTCARCGHCVRENRATQAEFRCRPRPGGVSGTYKSAPRESGHDERMNVNLSVIPAFLAGHARLLDRRRHDLLMGDGDATGVLAALEGYRNADGGYGWGLEPDLRAPESQPGAALHAFEVFEEIAPATAPQAAALCDWLESVTLPDGGLPFVLPIGDTAATAPWWAGGDPAVSSLQITSVSAAAAHRVAVHDPAVAAHPWLEQATRYCLDAIQAMKEPPHAYVLAFAVRFLDAVHDTRPRAAELLKRLGDHIPEDGRVRVEGGTEEEALRPLDFAPSPGRPARTLFEPEVIAADLVRLAGQQRDDGGWAVDYARISPAGAMEWRGAATVNAVKILRANGLV

SEQ ID NO: 3431 - protein, 278 aa, unidentified
  REGION 1..278: note = Table 20
MEWPADRDGCRWDSVTGEHRVYLQGVGHVRVHRHRPIAGRVKTLSVKREGRRWYVIVSCEDVSAAPLPPTGRAVGIGLGVASFVTTSDGEQIDNPRHLRAAADQLAEAQQALARCQRGSNRRKQARARVAALHGKVRRQRLDHAHKVALALVRRHDVICHEALRIANMARSARGTLAEPGRNVAQKAGLNRSILDAGWGVFLSILTAKAESAGRTLIAVDPANTSRTCPSCGHCGAENRVTQAAFRCLRCGLDTHADLVGAVNVLRAGLARRDAAPAA

SEQ ID NO: 3432 - protein, 278 aa, unidentified
  REGION 1..278: note = Table 20
MLCGYVVTVRQDAAGFRYKVRRHRPVVGKVKTVSVKREGKRWSVVLTAEQPQPQPQPEPLPATGSVVGIDMGVAPFLTTSGGEHIANPRHGRKAAAKAGPNRSMADAGWGVFLTILTGKAESAGRKVIAVDPRNTSRTCPECGHVAKENRSTQEKFHRVACGHQAHADVVGASNVLRAGPARREAQPAQREAPTFRWGRSHGRVPLWTIPGVPQDPADPCRYLSVSPRSQGSGAHERTASGGCFMRCLATKRISHPRSAMNCHPLRRLAAAPVDASAR

SEQ ID NO: 3433 - protein, 420 aa, unidentified
  REGION 1..420: note = Table 20
MSIKAYRFQLRTRPGVERLLRRFTGSCRWAWNAAIAEQRRRREAGEKFSPYAAMCRWLTEWRHAPETAWLAQAPIHPLQQTLRRLEAAYQRFFAGRGGYPKFKRRGQEPGLRFPDPKQFALDQGNARVKLPKLGWLRMRQSQAVVGELRNATVTAERGKWFVSLQVEQPDVLPSAELMPTLGIDLGVALFAALSDGRTVEPLDALKQQQRRLKHAQRAVSRKVKGSRNRRKAVDRLGRLHARIAAQRNDWLHKLTTELADQHPAIAIEELKVAAMSASAAGTADAPGQRVRQKAGLNRAILDQGWAEFRRQLEYKCAARGGAVVAVNPAYTSQTCSRCGCVDAGNRTAQAIFACLACGHAENADVNAAHNILAAGRAVWAARPTACGAEVSRASPARGRRAAAVKQEPTEATPAAAAEAR

SEQ ID NO: 3434 - protein, 447 aa, unidentified
  REGION 1..447: note = Table 20
MLVLQSYRYAMHRAKPLEARFRRFAGARRWVWNKALALQFDARSRGEKAPRYVDLANRLPRWKLEHPWLKEIHSQVLQQALKDLDRAWAKRFKDLSAVKRGEMRPMDAAGEPSFRRYGIGDSFRYPQPKPEHVDAANGRVFLPKIGWARYRNSRRPEGQPKQITVSLDAGRWVVSITSEVERQAGALPCAGEVIGADRGVTDTLALSNGHRVAPLNALKRSAYRLKRYQRAVARKIEAQKRAMGLDPKAPFPKGVRPGKSNRQRRAEQRVARCHRHIANQRRDWLHKETTQIANRAAVVVLEDLNIRNMTASAKGCAEAPGRNVRQKAGLNRAILDQGWHALEALLRYKLGWRGGEVIKVSPAYTSQKCSCCGHVDAASRNGKHYLCTACGHAEDADINAAKNILAAGLAVLAGRTAARMDVEDAVQPSRPMKRQPASAKGGAACNP

SEQ ID NO: 3435 - protein, 393 aa, unidentified
  REGION 1..393: note = Table 20
MQFFQGYLYALRLKPQKEALLRRWVGCRRWVWNEALAFQRAELEAGRGRPTYAELCARLPVLKKANPWLADPPAQALQQTLKDLCEAWDKHRTSGAGAPRFKARGEGESLRFVQDLVYDAPGGRIRLPKLGFVRMRHSRVAEGVLKNATVRQERGRWVVSLQMRRDVDEPLPVGTAAVGLDFGVATTIMPSAGAPIELPARLSKYERRIKRLQQGLTRKAKGSKNRRKARCRLARCHAKAVALRRDFLHKATTALVEQHALIAIEDLRVQQMTRSSAGTGDRPGKCVKRKRGLNRTILRQGWGLARRMLEYKGARRGVRVVAVEAAFTSQTCAACSHVDRANRRTRSAFACVACGHHDQADRNAAKNILARALASLVSGQSSHLDVCRPVRAR

SEQ ID NO: 3436 - protein, 558 aa, unidentified
  REGION 1..558: note = Table 20
MAKASANPSADSASGVLRGYRYRLEPDAAMAEGLARCAGAARWVWNKALERQKERIQSGLRPAGYAEMARWLTEWKAEPSTAWLSCAIAQALQQRLRDLSLAIQASQTADAKSQSLPVFKAKRARTSFRLPQRVRVLTDTDGWAYLQVPKLGRCKMRLSRPLPATPRNCTVSFDGEHWFASFQVQVPGRRPTSGGALGLDVGVNVSVAASDGSLWNRESGQRKMQAKLAELQRSLARKQRRSRNWHRCRARLARLCASLAGARNDWTHKLTSHLACSARYIAIEDLRVKNMLSSARTSTGRPGGSHAQKRGLNRAIWEEGWSRFRYQLTYKVAEAGGTVIAVPPANTSRRCFACGTVDAASRRSTRFACVACGHEDHADVNAAKNILRAAGHAVLACGDPADGRVNEAGTEASASQVGAKSRPKGGRMPIRTRMCSSILSIAISAIFVAPAAEAQKARLPVEDFRPLLVNAIESAEGRAFGILIGPMAEALTTRMKATSPILIDVTTLRRYKQAGCSRLNVRFSQDGVVLPGTDKPRKQTFDLGLNYCRDGQPPRSLA

SEQ ID NO: 3437 - protein, 420 aa, unidentified
  REGION 1..420: note = Table 20
MKRQIGFKYRLDPTPEQAARLRVLAGHSRFVWNKALAECQATRERGESVPRYNTMAGWLTAWKRQPDLAFLTEAYTDNLQQKLRDLDTAWQRYFAPELDAEPPSFKKKGKSRDSIRFVNFPKYCALGHREVKLPAGLGWVGFRQSRQSRKRRPFLPTAERGQVEFALNREMPPTVGKIKNCTVGLDGGDWSISFLIEYEVKVPTHPAVTAIGLDMGVAHFVTDSDGKHYAGRNSFRHIERRLAKAQRRLKHKAKFSQNWKTQKARIARLHHRAACARCDTLHQLSTRLSKSHAMIAIEDLKVANMTASAKGTQEVPGKRVKQKAGLNKAILDQGWFEFRRQLAYKQAWRGGLLEVVPPRHTSQTCPECQHVDAGNRVTQARFHCQSCGYSTNADVVGARNVLARAHAHLSGRDAPVAPVK

SEQ ID NO: 3438 - protein, 260 aa, unidentified
  REGION 1..260: note = Table 20
MLRRQAYRFELRPSGQQLRNLRRFAGSCRFVYNQDSARNTARYNKKRLGYAGLCALLPNWKREHPFLSEVPAQALRQALKDLERAYTNFFLKRSEFPKFKKKGQRESFRVPQGFEVDNGIGLDWGVVRLYTRSNGAYREQCQPLKRFLPKWRRRMTQKRKFSRNWKKAKTGIAKLRQRIANIRKEFRSSNEISKNHAVVFVEDLPVSNMCKSCKGSRTCPVAWGECGQVSADNRKTQAKLVCLKCGLSANADFISAANIR

SEQ ID NO: 3439 - protein, 881 aa, unidentified
  REGION 1..881: note = Table 20
MHMQGKHAGSTVPKVLAFVHRPDHHASMERRQAFRFELMPKGEQPRQMSRSAGCARYVYNQALALKKERYEKQEKLTRFQLDKMLVEWKQETPWPSEAPAHALQQALLDLDRAYTKFFRKRAQFPKFHKKGVRDSFRESDPKCIKLDQVNRRIQLPKLGWVRYRKSREVLGEIPSVTVSLSAGQWFVSISTRREVEPPLHPSTSSVGLDWGVARFYTLSDGEYEDQLQPLKRFLPKLAKLERRLAGKKKWSSNWKKAKAKITKLHSKIAHIRKDFVHKASHDISKNHAVVFVEDLAVKNMSASARGTKAKPGKRVGQKSGFNRSILDASPFELRRQLAYKTQWKGGLLVPVPPQNTSRKCPRCGHTAAENRKTQTKFECFECGFSANADWVGAINIKEAGLASLACSSSSHARNASCQEPPRAWYARAYRACRNPLRSRRGGCQQSGIFGARARRAHTQNGRGNRGPGEYSMRDIAIVGGGQSGLQLALGLLQNNYKVTVVSNRTPEQIFNGRVTSSQFMFHDSLQNERDLGINSWEKKCPITEGIAFTIPGPNKTRALFWEAKLDHYGQSIDQRVKFAGWMKEFAKRGGDLVIKDAAPQDVDQVSKSHDMVIVAAGKGEINRMFERDAEKSPYDQPMRALALTYVKNMVPRKPFTAVSFNLIPGVGEYFVFPALTTTGPCEIMVFEGVPGGPMDCWNDVKTPEQHLAKSKWILETFMPLEADRCHKVELTDDNGILVGRFPPTVRKPICKLPSGRLAFGMADVVVTNDPITGQGSNTASKAAAIYLEQIVKRGNKAFDAQWMQQTFDIFWDYARWVVEWTNSLLIPPAPQILQLMGAATQVPSLAGKIANGFNNPPDYSPWWFDPAEADKLIKHVSAAAV

SEQ ID NO: 3440 - protein, 376 aa, unidentified
  REGION 1..376: note = Table 20
MMIYKSFKFELILNNEQIRSLRKNFGCVRFISNNALAWHNKCRESGSKLRFDSRDAMRELESWKKEFPWLNEYQPQIIKEAIRDLETAFKHYYAKRLAYPRFKAKGVKESFRVSEGFKVEQQNNRCYLPEIGWIRYINSREIKGTIRSITISYKCKKFFISILALLEAKPVNHPEREVGIDLGIAQFATLSNGVIYTPLSVYKKYRIYAQKLEKQLKNKQLYSNNREKLKDKLAKLHSKMANCRKDFLHKLSDKLTKRYRQIYVEDLKINRMATSGNLLSKKELVDNKKELNKSIMDQAWYEFRRQLEYKSNWRGGKSIKVSSVNTSKECPICHFISSENRPYRGLFKCVRCHYSNNADVVGALNVLARGRIFAKS

SEQ ID NO: 3441 - protein, 429 aa, unidentified
  REGION 1..429: note = Table 20
MQIEKGFTDNWLQPTGAQEKLMRQYAGCQRFVWNRALSIEQARYRRGEKRLLGKFEMMRQLTMWRNNPDPHSNFLKAAPVHALQCVLYELYDSYQRFFRGQQVRPPQFKKKSKARISFTESDPACFEMDEPNKRVRLPKLGWVKCRFTRHIEGQPNSVTVKWNGMRWVLSAECKVAIAEQTHPSDTIVAGDFGVVRRVTFSDGVVVPPIDVSWEEKRKSFYQRRLKNKRRFSRNWKKVVDKISKLDSRIAHIRKDETHKFTSGYVKNHAVIVLGDLHIKSMTASAAGTVEQPGRNVKQKSGLNRAILRQGWGELGRQMEYKQSWAGGLAEYQSEAYSSQRCPACGYSSALNRKTQEGFRCVWPTCGFSGHADEVAAQNQLRKFLSSDKGVALLASGYRASVNSLRSGRSWDSTRKQEPIEEAAQCTQPQ

SEQ ID NO: 3442 - protein, 366 aa, unidentified
  REGION 1..366: note = Table 20
MVIRKAFRYRLKTNQAITQLLRRVAGCVRFVWNRALALQQERLKQGEKLLGYAELCALLTVWRHDPATAFLAECPVHTQQQTLRDLSRALRDGLSKTSAKRMPRFKKKGRDLDSFRYPDPKQLKLESGRVFLPKVGWVRYRDSRPVVGTPAVITVSRRGEHWYVSIQTERDAAEPVHPLKTEVGGDMGIARFVTFSDGEVVEPLDSFEFRVSSFEFRVEEFTLFELETPNSRRETNKTHATVFLEDLKIASMSASAKGTTEDPGQNVKAKSGLNKAILDQGWYEFQRQLAYKLRWLGGTLFLVPPRDTSRRCSACGHTAAENRPSQAVFRCVQCGHSENADLNAAKNVLGAGQALSACGAIKPVAA

SEQ ID NO: 3443 - protein, 516 aa, unidentified
  REGION 1..516: note = Table 20
MEITKAYKYQLKPRDRHVSSFESWSGACRFLWNVMLEYREMTYKADQLVEGRDVLEKWLLYKILNESRKVEFKAEHTEGEAEKAKVQEELPARLLEVKKRHTEAVAGNFAKALAIIDWSAGMAIQRSAAKKESGSTTKLKPLTEQFVARKKAILAPWSEGGSMDDFRSVMEKAKTPLMLGKSVTLREMQVKPSLAPLGIEFEWFAEVPSCSLQQVIKNQDVAFKRFFQGQARFPNRKRRGQDSFYLDNAGAVSVAGNKAKIRNMGEVRFFQDREIEERWSKKENRNSATVSKSGNKWYISFSINEKIPDPQTPKGEIGLDRGITSLVAFSDGRLTPPVNSLEKTLGKLAKAQRVMAKKDKGSNRWRKQVKRIAKIHHEIGNSRKTYLHKLSKQVTEENGLIVLEDLQVRNMSASAKGTEEAPGKNVRSKAALNRRILDQGWGELRRQLEYKAVWEGGEVIAVPPQYTSQQCSACGHTHEDNRDGAKFLCGECGHEENADVNAAKNILKKGLDERSA

SEQ ID NO: 3444 - protein, 305 aa, unidentified
  REGION 1..305: note = Table 20
MALYVLAFLDRSNIGFAKQTYQIDTGLSNEAYALGAGIFFVVYAFLGVPANLLMRKLGARTWIGTTTLLWGFLSAAMAWADTEAKFLIVRTLLGAAEAGFFPGMIYLTSQWFPQRNRASIMGLFYMGAPLALTLGSPLSGALLEMHGFMGHPGWFWMFVIEGLLAVGAGVFTFFWLDDTPEQARFLSKEEKTLLINQLASEEQQKVTSRLSDALRNGRVWQLAIIYLTIQVAVYGLIFFLPTQVAALLGTNRLSQSKFRCQACGYTANADVNGARNILAAGHAVLACGEMVQSGRSLKQEPPEMI

SEQ ID NO: 3445 - protein, 415 aa, unidentified
  REGION 1..415: note = Table 20
MTKPVSTTKKIRRQYSPEFRQEALKLAERTGVAAAARELSLYESQRYNWRSKQQQQLSSSDRENELAAENARLKRQLAEREEDLAILQKAGDILRETPERKYVFIEKHQAEFSIKAMCRVLRAARSGWYVWNQRQVRLNSRQQFRLSCDSAMHGAFQRAKQRCGAPRLTDELHAQGYCFNVNPEPAHNATSMVGLDAGVTGLATLSDGTVYQPVNSFKANQRKLATFQRQLSRKVKFSSNWQKQKRKIQHLHSHIANIRRDYLHKVTSEISKNHAMIVIEDLKVGNMSKSAKGTAEQHGRNVRAKSGLNRSILDQGWYELRRQPEYKQLWRGGQVLAIPPAYTSQRCACCGHTAKENRLSQSRFECLECGYTENADINGARNILAAGHAVLACGGMVQSGRPLKQEPTGASQAQV

SEQ ID NO: 3446 - protein, 1420 aa, unidentified
  REGION 1..1420: note = Table 20
  VARIANT 1198: note = misc_feature - Xaa can be any naturally occurring amino acid
MSGKPAARQGDMTQYGGPIVQGSAGVRIGAPTGVACSVCPGGMTSGNPVNPLLGAKVLPGETDLALPGPLPFILSRTYSSYRTRTPAPVGVFGPGWKAPSDIRLQLRDDALVLNDNGGRSIHFEPLLPGEAVYSRSESMWLVRGGKAAQPDGHTLARLWGALPPDIRLSPHLYLATNSAQGLWWILGWSERVPGAEDVLPAPLPPYRVLTGLADRFGRTLTYRREAAGDLAGEITGVTDGAGREFRLVLTTQAQRAEEARTSSLSSSDSSRPLSASPFPDTLPGTEYGPDRGIRLSAVWLMHDPAYPESLPGAPLARYTYTEAGELLAVYDRSNTQVRAFTYDAQHPGRMVAHRYAGRPEMRYRYDDTGRVVEQLNPAGLSYRYQYEQDRITVTDSLNRREVLHTEGGAGLKRVVKKELADGSVTHSGYDAAGRLTAQTDAAGRRTEYGLNVVSGDITDITTPDGRETKFYYNDGNQLTAVVSPDGLESRREYDEPGRLVSETSRSGETVRYRYDDAHSELPATTTDATGSTRQMTWSRYGQLLAFTDCSGYQTRYEYDRFGQMTAVHREEGISLYRHYDNRGRLTSVKDAQGRETQYEYNAAGDLTAVITPDGNRSETQYDAWGKAVSTTQGGLTRSMEYDAAGRVISLTNENGSHSDFSYDALDRLVQQGGFDGRTQRYHYDLTGKLTQSEDEGLVTLWYYDESDRITHRTVNGEPAEQWQYDDHGWLTDISHLSEGHRVAVHYGYDDKGRLTGERQTVENPETGELLWQHETTHAYNEQGLANRVTPDSLPPVEWLTYGSGYLAGMKLGDTPLLEYTRDRMHRETVRSFGSMAGSNAAYKLTSTYTPAGQLQSQHLNSLVYDRDYGWNDNGDLVRISGPRQTREYGYSATGRLESVRTLAPDLDIRIPYATDPAGNRLPDPELHPDSTLTAWPDNRIAEDAHYVYHYDEYGRLTEKTDLIPAGVIRTDDERTHHYHYDSQHRLVFYTRIQHGEPLVESRYLYDPLGRRMAKRVWRRERDLTGWMSLSRKPEMTWYGWDGDRLTTVQTDTTRIQTVYQPGSFAPLIRIETDNGEREKAQRRSLAEKLQQEGSEDGHGVVFPAELVRLLDRLEEEIRADRVSSESRAWLAQCGLTVEQLARQVEPEYTPARKVHFYHCDHRGLPLALISEDGNTAWRGEYDEWGNQLNEENPYYLHXGLDAGVAKLATLSDGTVFGPVNSFQKNQKTLARLQRQLSRRVKFSNNWQKQKRKIQRLHSRIANIRRDYLHKVTTTVSKNHAMIVIEDLKVSNMSKSAAGTVSQPGRNVRAKSGLNRSILDQGWYEMRRQLEYKQLWRGGQVLAVPPAYTSQRCACCGHTAKENRLSQSQFRCQVCGYTANADVNGARNILAAGHAVLACGEMVQSGRSLKQEPTEMIQATA

SEQ ID NO: 3447 - protein, 859 aa, unidentified
  VARIANT 706: note = misc_feature - Xaa can be any naturally occurring amino acid
  REGION 1..859: note = Table 20
MSTGLRFTLEVDGLPPDAFAVVSFHLNQSLSSLFSLDLSLVSQQFLSLEFAQVLDKMAYLTIWQGDEVQRRVKGVVTWFELGENDKNQMLYSMKVHPPLWRAGLRQNFRIFQNEDIKSILGTMLQENGVTEWSPLFSEPHPSREFCVQYGETDYDFLCRMAAEEGIFFYEEHAYKSTDQSLVLCDTVRHLPESFEIPWNPNTRTEVSTLCISQFRYSAQIRPSSVVTKDYTFKRPGWAGRFDQEGQHQDYQRTQYEVYDYPGRFKGAHGQNFARWQMDGWRNNAEVARGTSRSPEIWPGRRIALTGHPQANLNREWQVVASDLHGEQPQAVWLTHDPAYPDEQPTAPLARYTYTAGGELRAVYDRSGTQVRGFTYDAEHAGRMVAHHYAGRPESCYRYDDTGRVTEQVNPEGLDYRFEYGESRVIITDSLNRREVLYTEGEGGLKRVVKKEHADGSITRSEYDEAGRLKAQTDAAGRRTEYSLHMASGAVTAVTGPDGRTVRYGYNSQRQVTSVTYPDGLRSSREYDEKGRLTAETSRSGETTRYSYDDPASELPTGIQDATGSTKQMAWSRYGQLLAFTDCSGYTTRYEYDRYGQQIAVHREEGISTYSSYNPRGQLVSQKDAQGREIRYEYSAAGDLTATISPDGKRSTIEYDKRGRPVSVTEGGLTRSMGYDAAGRITVLTNENGSQSTFRYDPVDRLTEQRXLHKVTTTVSKNHAMIVIEDLKVSNMSKSAAGTVSQPGRNVRAKSGLNRSILDQGWYEMRRQLEYKQLWRGGQVLAVPPAYTSQRCACCGHTAKENRLSQSQFRCQVCGYTANADVNGARNILAAGHAVLACGEMVQSGRPLKQEPTEMIQATA

SEQ ID NO: 3448 - protein, 439 aa, unidentified
  REGION 1..439: note = Table 20
MTKFSVVVAGGGSTFTPGIVLMLLANQDRFPLRALKFYDNDGARQEVIAEACKVILKEKAPDIAFSYTTDPEVAFSDVDFVMAHIRVGKYPMRELDEKIPLRHGVVGQETCGPGGIAYGMRSIGGVLELVDYMEKYSPNAWMLNYSNPAAIVAEATRRLRPNAKILNICDMPIGIESRMAQIVGLQDRKQMRVRYYGLNHFGWWTSIEDLQGNDLMPQLRQYVSKHGYVPPQQDTHTEASWNDTYAKARDVQALAPDTLPNTYLKYYLFPDYVVQHSNPEHIRRDYLHKVTTTVSKNHAMIVIEDLKVSNMSKSAAGTVSLPGRNVRAKSGLNRSILDQGWYEIRRQLAYKQLWRGGQVLAVPPAYTSQRCVCCGHTAKENRLSQSKFRCQVCGYTANADVNGARNILAAGHAVLACGEMVQSGRSLKQEPTEMIQATA

SEQ ID NO: 3449 - protein, 373 aa, unidentified
  REGION 1..373: note = Table 20
MYAPDSALPVDLIEQQCWSRATDTYGVKHQRKERPCEEKESYRWQQASERMAERLGEIQKQVITVCDREADIWHYLHYKVSRGKPHAECDAKRRAGSPPGPDAHQLQRSQHKKSRQQRPGALAHVCLLRGAGEDGACWYPLTSEKVASAADARRIVSHYEQRWLIEEYHKAWKSGGTCVESLRMQTRDNLERMVVIAVRVLGLRQGGISEETQNDSCEKILTPTEWKLLWVKLEGKQLPAQTPTLKWACLKLAKLGRWHDSKRTGLNRSILDQGWYEMRRQLEYKQLWRGGQVLAVPPAYTSQRCACCGHTAKENRLSQSKFRCQVCGYTANADVNGARNILAAGHAVLACGEMVQSGRSLKQEPTEMIQATA

SEQ ID NO: 3450 - protein, 297 aa, unidentified
  REGION 1..297: note = Table 20
  VARIANT 179: note = misc_feature - Xaa can be any naturally occurring amino acid
MCQVFGVSRSGYYNWVQHEPSDRKQSDERLKLEIKVAHIRTRETYGTRRLQTELAENGIIVGRDRLARLRKELRLRCKQKRKFRATTNSNHNLPVAPNLLNQTFAPTAPNQVWVADLTYVATQEGWLYLAGIKDVYTCEIVGYAMGERMTKELTGKALFMALRSQRPPAGLIHHSDRGXPGRNVRAKSGLNRSILDQGWYEMRRQLAYKQLWRGGQVLAVPPAYTSQRCACCGHTAKENRLSQSKFRCQVCGYTVNADVNGARNILAAGHAVLACGEMVQSGRPLKQEPTEMIQATA

SEQ ID NO: 3451 - protein, 825 aa, unidentified
  REGION 1..825: note = Table 20
MAQVINTNSLSLITQNNINKNQSALSSSIERLSSGLRINSAKDDAAGQAIANRFTSNIKGLTQAARNANDGISVAQTTEGALSEINNNLQRIRELTVQASTGTNSDSDLDSIQDEIKSRLDEIDRVSGQTQFNGVNVLSKDGSMKIQVGANDGETITIDLKKIDSDTLNLAGFNVNGKGSVANTAATSDDLKLAGFTKGTTDTNGVTAYTNTISNDKAKASDLLANITDGSVITGGGANAFGVAAKNGYTYDAASKSYSFAADGADSAKTLSIINPNTGDSSQATVTIGGKEQKVNISQDGKITAADDNATLYLDKQGNLTKTNAGNDTAATWDGLISNSDSTGAVPVGVATTITITSGTASGMSVQSAGAGIQTSTNSQILAGGAFAAKVSIEGGAATDILVASNGNITAADGSALYLDATTGGFTTTAGGNTAASLDNLIANSKDATLTVTSGTGQNTVYSTTGSGAQFTSLAKVDTVNVTNAHVSAEGMANLTKSNFTIDMGGTGTVTYTVSNGDVKAAANADVYVEDGALSANATKDVTYFEQKNGALPKLGWMRYRNSRQVTGVVKNVTVSQSCGKWYISIQTESEVSTPVHPSASMVGLDAGVAKLATLSDGTVFEPVNSFQKNQKTLARLQRQLSRKVKFSNNWQKQKRKIQRLHSCIANIRRDYLHKVTTAVSKNHAMIVIEDLKVSNMSKSAAGTVSQPGRNVRAKSGLNRSILDQGWYEMRRQLEYKQLWRGGQVLAVPPAYTSQRCAYCGHTAKENRLSQSKFRCQVCGYTANADVNGARNILAAGHAVLACGEMVQSGRPLKQEPTEMIQATA

SEQ ID NO: 3452 - protein, 507 aa, unidentified
  REGION 213..216: note = misc_feature - Xaa can be any naturally occurring amino acid
  REGION 1..507: note = Table 20
MSGLTKTSSGSGLLFPDSKKRGQNDAFRYPQGVKLDQENSRIFLPKLGWMRYRNSRQVTGVVKNVTVSQSCGKWYISIQTESEVSTPVHPSASMIGLDAGVAKLATLSDGTVFGPVNSFQKNQKTLARLQRQLSRKVKFSNNWQKQKRKIQRLHSCTANIRRDYLHKVTTTVSKKHAMIVIEDLKVSNMSKSAAGTVSQPGRNVRAKSGLNRXXXXFRYPQGVKLDQENSRIFLPKLGWMRYRNSRQVTGVVKNVTVSQSCGKWYISIQTESEVSTPVHPSASMVGLDAGVAKLATLSDGTVFEPVNSFQKNQKKLARLQRQLSRKVKFSNNWQKQKRKIQRLHSCIANIRRDYLHKVTTTVSKNHAMIVIEDLKVSNMSKSAAGTVSQPGRNVRAKSGLNRSILDQGWYEMRRQLEYKQLWRGGQVLAVPPAYTSQRCACCGHTEKENRLSQSKFRCQVCGYTANADVNGARNILAAGHAVLACGEMVQSGRPLKQEPTEMIQATA

SEQ ID NO: 3453 - protein, 421 aa, unidentified
  REGION 1..421: note = Table 20
MPVAACKAGTPRRSYVTVRYRLRGKKAIYRYLNELAGANRYLWNAALAHIKEDFTETGKSNTSYVSLCGWYKQHKETSAPWLSAYPAAATRTGLKDLADAFTQFFKKVRRFPKFKKKAKTKKSFQIDVSGGSRFTEQGYFRLKRGLFVKMMGRERVHRYVNPIAKSARIFEEHGHWYMAVQYKVDALEYDADETGVGVDRNVGQIAVNAGQMYLLTDVLKRFSRIVQLQRRLAKQKKRSNRWKKTKKMIARHERKIARIRKNDLRHIAKLITSISTLVFLEDLKTKGMTKSAKGTIEEPGKHVKQKAGLNREILRTAWATLERFLKERGYVYKVNPAYTSQTCSACGNRAKENRKSQSEYSCSECGFELNADINAAMNIWASGMASMNGRGAYVRPVLVRQDRQQVTKRQNEHEGLRHQCI

SEQ ID NO: 3454 - protein, 505 aa, unidentified
  REGION 1..505: note = Table 20
MTADPHSTIQPLPHGEPQVRNERYRVRFDNRAQAAYCARIAGANRFVWNLVLTICEWRYDRHLAEKESDPEAKPPGTSAFDLFKLFTVVRSRPQEEWYLDFLQSDRGEYYRDRDLAWLRDLPFAPVRYSLKYLADSYKRFYKAAKEAKKQGRKLPRRKSDGKPQGFPRRKGFGVKCDGFTIPDGVRMDGERLRIPKAGWVRLDGSGQYLGCDAKQVRIIREGTEDRPKWYAIVSYHVTPDRLKQPAWTGALGVDRNVGQATDSDGVVYESPDDSLIDTKIKRKQRELSRKKGWGPKTRGQKKSNRGRRVNGQLKKLHRKKKRRRENAAHQHSRKIANTAHTVVLEDLNTAAMTKSAKGTVEEPGLNVKQKSGLNRSVLASGWGALDRNLDYKAGAVKRINPAYTSQTCSHCGNVNKENRKTQANFNCTACGFKANADHNAAINILVGGGFSAPDPTARGTGATARRDALGHCLGPPAQGKSASTTREQDMPPPPGAAASGDQSGI

SEQ ID NO: 3455 - protein, 540 aa, unidentified
  REGION 1..540: note = Table 20
MPNSPDSTTQAPDTVHRTVRLRLYPGDAATGILLTAIAGTCRHVWNHMLADCEWRYARWKEMYVPAANWPEVRAGQTAWAKAVRKRMGPKPSVACYTLYKRFTELRDDPDHAWLQDYPFACVRDTLKYLADAYTRFLNDPRNEGRPRFKARHCTVPAFTIPSDVQIGDGRLRVPKVGWLRLAGLDRYAGCKPLTVRVRMEGTEQHPQWYAYVCYAVPAEQVRPPAADGALGLDRNVGQATDSNGSVRHIRHGQAGWADRPQAAGAEPQAGLGPEGQTVQVEPGPARERATLQAAPQTGAPARQCHASGQPHDCGDGAHRGGGGSEHEGHDPVRQGHGGEPGRQVKQKSGLNRSLLASGWGSLERKLAYTSQTCSRCSHVHRDNRPSQAVFTGGACGFQANADHNAAINILVRAGLPSVPVSARGTGAATRRGAIPWGPRRPVNRICRLFGQVYESLTNRMPVGRPGRCHPGVKCGDDPLAAGHPLVMLTLRCHHNPDRSHGAGTDIYGTRPGQRAQGHRWQGRTNPPHDPGAAVRRPRAD

SEQ ID NO: 3456 - protein, 478 aa, unidentified
  REGION 1..478: note = Table 20
MTVELLCYNYCEREDPTANRALNRTRCRGTMASIPKSTTQEPPTVIRTLRVRLYPGTATNGRYLEQLAGACRFAWNHVLAGHERDYRTWKAFGKLGDGPGSPTFFTLGQRFTQLRNAPGNEWLQDYSYEIVRYTCKYLGDAYAAFFDPDRPDHGRPQYKARHYTKPAFTLPSRVRIEDGRLYIPKMGWTRLGPIHRYADGQPLTVRVRQESEGKQPKWYAYIVFEVPVDHPDVCQPAESGAVGVDRNVGQATDSEGTVYAMPDTTVEDAKIKRYQRRMARQQKGSQRRRGTGGKLRKLQRKRARRRDNATHQISRKVADTAHTVVLEDLNTKAMTKSAKGTVENPGKNVKQKAGLNRAILASGWGQLERKFDYKASELRFVEPAYTSQACSQCGYTAKSNRPSQAVFRCGACGFRANADHNAAINILVRAGLPPVPVSARGTGAAARRGALPPWSVARPAKGTPATREPDMRGVNHRI

SEQ ID NO: 3457 - protein, 409 aa, unidentified
  REGION 1..409: note = Table 20
MTKEIRTVEFVVLPTTRAKARKMFQIAGACRYVWNHFRERNLADYQAFKNGKGERPQTSYFSLGVEFTKLRHETEWLGELPANPVKHTLKYFADALGEAMAGRKGFPKPHSKNRHAPGFTLPSTGQFRIEKRSRKYSLLRIQGVGWVTLTREGGFPYEGIPKQIRLRHDGHRWRAFVSYEVEVERRPDDGEVLGVDMNVRQIATSDGDFYFLPDLKKKEARRKRYQRRMARQLKGSGRRRDTKKKLAKVSRNIANVRKNWVHHTTQKIAGKSGTVVVENLKVNNMTASAKGTIENPGKNVRQKAGLNRAMLDTALGEVRRNLEYKCGRLIEVNPAYTSQTCSHCGHVDRENRKTQQRFLCVSCGFMSNADTNATINIRRLGMAQLHGEECSGSKQTPTTREIDARQPDG

SEQ ID NO: 3458 - protein, 481 aa, unidentified
  REGION 1..481: note = Table 20
MVLQVAADRVRRLGHVFDCRQGLRLQVQMPACKPGKGGIIALWVGQGKGIMQQNQQWHGRLGNCMLDHMSVPTGQSAAAIRAVRYRVLPGTPAKARQLNRLAGACRHVWNWSLDRQRAAWLGWLFSSAERPPPPTFFTLGKAFAELRNSSGHEWLKALPFSAVRYALKHQADAWQAFFKGQRGRPKFKGRGGEAGFTIPQAVRIKDDVIAVPKLGGYRLRRRGGNPHPDGVAKQAVFKREGGKWFCTVFYEVANDPRPDDGSCVGVDRNVRQCALSTGEVIRMPDASRLEARRRRYQRRMARQAKGSGRRKRTKAKLARTHARIRGIRSNWCHQTSRRIADAAHTVAIESLNTKGMTRSAKGTKKEPGTNVKAKSGLNREILASGWHGLERNLDYKAGNVVGINPAHTSQTCHECGFADSANRPSQSTFRCQACGHEANADVNAARNIRRQGLAQLDGEGRGCSRASPMTRQTGGGLRQAA

SEQ ID NO: 3459 - protein, 421 aa, unidentified
  REGION 1..421: note = Table 20
MDDGSIHRMNDATEFRAVTFRLHPGTRAKHRKLAQIAGACRYVWNHFLACNRRDHATYKLRKLMFDAGLLIDKPSPPSLSFQSMGVRFTALRRETPWLQRLPYAPVRYALKYQAEAWTRAFAGGGFPRFKARRGDDSFTIPQDVRVRGGVLSVPKVGRIRLSRRGGNPYAEHPPVKATVKRVNGKWYCVVVYKVSTVGRPDNGLALGVDMNCGQVAASTGDLLRMPDMARLQARKRRYQRMVARRSKGSNRRHRARHRLARTQRRIATIRHRWHHETSRTLADTAGLLAVEDLKTKAMTRSAKGSAEHPGRNVRQKAGLNREILNTGWSQLRRMLEYKAAHVEVVPPMYTSQTCRGCGAADPASRKSQSEFKCVRCGHTGNADVNAALNIMASATGATGRRGALALATPMNRQNVYRRRAV

SEQ ID NO: 3460 - protein, 395 aa, unidentified
  REGION 1..395: note = Table 20
MSERTAHRQVVYRLLPRKRVNWRWLERTLEDQRQLYNAALEERIDCHRKTGEGLSYFDQCKSLTVCRQALGDMSAVSVMIQRGTLKRLDEAFKGFFRRGGGFPRFQGRHHWNSISVVSGVKVESDRIRIPSFGWLTIRRRGGNPHVDGAAKSAVLKRVEGRWYVVVCYAVSLPEPVDDGRVVGVDMNAGQVATSDGVIHRAPDMGRLQARKRRYQRKVSRCKRGSKRRARAKHRLAKTARRIACKRHDWQHKASRTIADAAHTVVVEDLKPKAMTRSAKGTAGEPGGKVKQKAGLNRVILETGWSDLRRMLSWKTGRLIAVDPRHTSQTCAACGVVDARSRRTQAAFMCVSCGHADNADINASREIRRRGLAQLHGEGVAVRHPVNREDIPRLAA

SEQ ID NO: 3461 - protein, 419 aa, unidentified
  REGION 1..419: note = Table 20
MTAHRTIVYRLLPETRANARLLMGQAGACRYVWNALLAESRERYVEWQEAQQAGNTEISKPSVSFFSLGKRFTVLRREIDWLDQYSFKITRYALKYQADAWKAAFGNGRGFPRFHSRHGRDPSFTVPDRVMIRDGKLYLPCIGWLPIRRRGGNPHPDGVPVRAVVKRQAGKWYVSVCYRVELPELVDNGEVVGIDRNVGNIAYATGKGDAGLIASPDLSRDDSLVRKASRKLSRQKRGSRRRQRHVLYLRKLHRRRANRWSDWQHKASRGIATMASTVVVEDLNIRGMSKSARGTVDNPGRHVKAKSGLNREILNMGWHGLVQRMSYKCREVIMVNPAHTSQTCSECGEIDGRSRRGRGFKCVACGHADHADLNAARNILASGIGAAAHGGILDGLPVLSAIEAMPLKCEMDTKVALST

SEQ ID NO: 3462 - protein, 421 aa, unidentified
  REGION 1..421: note = Table 20
MYNRSIRYRLYPMTLDKANLLKQCLGATRYVWNYFLAENQRMMEAYRADPSNSRPNTTFFSLGKEFTQLRRTKDWLGALPFAPIRYVLKYQADAWQQCFRSGKGFPKFKSRWYDTDSVTFPAGSFKLNDRSLHLAKIGQVVISGNNPYANSEPVSVVIREECRKFYATVCHGVKHVDHNQNSEVLGIDRNVGQFATSEGEIRYLPDLSKLESRRRRYQRMMARRRRPNRKKEIKPSHRYLKAKQLAAKTSRKIAHIRNDWQHQESRRIADHFQFVVIESLNTQGMTRSAKGTIEQPGKQVRAKSGLNRSILATGWSSFKLKLAYKAELIEVEPKHTSQKCHLCGHIEKENRKTRTKFECVRCGYSGNADINAALNILALGQSTVLQDYFLRIYAILNNFGRFCRGGSAPRPPKYGTFAQIR

SEQ ID NO: 3463 - protein, 418 aa, unidentified
  REGION 1..418: note = Table 20
MPFHDSYRNYILKSAMKAHRTIRYRLHSGTRTKARKLYGTAEACRFTWNHFVSKLRDDWRYCGRCDPRWYSNCTLFSVWRKHQEKWLQDYSFGIVRLALKPIETAYRQFWKGEGGLPRFKAQYDHVPSFPLGSGMFKLQGNYLHVQRIGQLKLTGNNPYPHGIARSGTIKYECGKWYAYIVYEVEIAMEPESINPVGIDRNVGQVARSDGVVHYTPDLTRLEARRRRYQRMMARRQRGNRKQGVEPSHRYLKAKNLHARTQQKIVQARTDWCHQVSRKIADDYTLVYMEDLDTKAMTKSAKGTADNPGKNVQQKTGLNREIRASGWHKLEQCLGYKSSVMKVNPAYTSQTCHACGHTDKHNRKTRAYHECVACGYRDHADVNAALNILAFGNGASGRGGGGATWPVKRQMDTPGPLWT

SEQ ID NO: 3464 - protein, 499 aa, unidentified
  REGION 1..499: note = Table 20
MPTTQFPLCKFTQLEVVYQFDFAPPDPTSTLAHHIRACISIQSQSPICGIMRSMQVHRATTFVACPDAAQNLRLFRLAGACRFIWNTLLAQNRFLHAGWRISANEKPSTAYEALTKELTQLRRKNDWLSQMPVAVLRSACKRLSLAWAAKLKRDAGFPKMKARHRATPGFDIVDNVRVESGRLWLGREAGWLRLNRRGENLYANWMPVKATLTHQRHSGAWQVTVTYRGEVALSPDDGTAVAVDRNVGQAVTSERLLYRLPDERLDRLTRKQKRWQSRAARQKGARKGEKCSNSRRRTLRRISQISRRKANIRRNWAHHVTADLAAHHHAVVMEDLNTRGMTRSVKGTKEKPGRRVKAKQGLNREILASAWGELERMAGYKSGRLVLVPAHHTSQTCRNCGFVAKESRKGRRYRCVSCGMEAHADLNAAMNILGRAVKLGLVNPPPTSLGGVRRVEPDTARDALFGRGRIVRLAAPRGGKRIRGGPEPPEPSSVSDAVA

SEQ ID NO: 3465 - protein, 412 aa, unidentified
  REGION 1..412: note = Table 20
MTVEVQDREYRGVEYRLLPGSRSNARKLSGIAGACRFVWNHFLAKNKEEYELAKKNGAKKPSTSFFSLGKEFTQLRKEIDWMQEYSFKIVRHTLKYQADARQGFYKGVRKHPRFHSKYGKRPSFTIPEDVKIKDGQLLIPKVGWMWIRRKGGNPYPDGKPVKGTVKKEGRRWRVSVIYEIDTQARTENGVAVGVDLNTYNVACTHSAGEQEMLDIPKPDKKEIRIRRYQRKLARQQKGSNRRRVTKQKIAKWKRKQKNARKNAAHHHSKTLASKAETLVREDLNIKGMTKSAKGTVENPGKNVMAKAGLNRVIQNAGWGRFNQYCDYKFRNVVEVDARYTSQRCSVCGHKSKDNRKTQSKFKCVACGHADHADLNASANILASGIGACGRGGAFSLETPMSRQIEGIFNYAL

SEQ ID NO: 3466 - protein, 517 aa, unidentified
  REGION 1..517: note = Table 20
MGRGEGPPRCGLFLRLSSLCGGGEGASRIRQRPIYPFPWGCPLTMRSQSWKWFSSAGSLFTGGETATFPGALIQNWGYIDRTRAAVWPPGLAPFHQQRQRDQLRSTCPLPPGPLPARLLPGTASKARQLFGLAGAGRFIWNHFLAKHQAAYQLHKENPEHHAKPSISFLSLGKEFTQLRNSGDFPWLQGYSFTIVRAALQSLSLAFQGFFRGKGHPRFKARGRDQPRFTIPDKGKIKGDRLSIPGVGLLRLRRHSGNPYPEGRPVKAAVVHECGKWYATVCYKVDLPPSAEPERVAAMDCNCRQVAVVYSDGTSEIRRQPDTTLLQIKLKRGQRKPGRQQKGSNRRQRTRTRLRKLHRRIRNMANTWRHRLTRHVADKARLLVLEKLNTQAMTRSAQGTVASPGRNVQQKAGLNRSILATGWGEIEQMLGYKTRVVYVNGAYTSRRCSGCGQVDKASRRSQSTFHCTSCGYRANADLNAAQNILASGVGATARGEAFSLETSTIRETGLGHSCDSWS

SEQ ID NO: 3467 - protein, 468 aa, unidentified
  REGION 1..468: note = Table 20
MVLRTYTFGVRFRKGFKKEMLARQAGMDRYVYNKLLETFKEEYRRAGRVNTTRGRINAWYTDLRNHSGPRWMRQSISGVTRQILHDLGRHYDQYVETEKLKAVNIKPKAEFGEPHFKKYGGHISIPFTITHDGTIGQARFTDTRTIKIAKMGEVKLSREFPVLNYRYKTAQLFQLPDGGWRITISCDIPDEKPTVTEPTVIGIDRNVGNVATPDCVMIIPEKVARRMNNAEKTASKAQKIASRRQKPDYTNRKPGSRRWVKAAKRAAKNKRKAANIRKTTAHKISRVISDSTTHAAFEKLPIQNMAKSAKGTEENPGKNVAQKSGLNKAILEQCWGLLALLLAYKLAGEIIWVAAAYTSQRCYSCGYTHKDNRDGRKFLCKKCGYTYHADCNAGSNIEDVGLKKLGPGARHGQLNLRNLPDNTGSTHCTRGVWTWRVLALAPLRNVKHRPGNEMHHVLSSSGVTCNVL

SEQ ID NO: 3468 - protein, 413 aa, unidentified
  REGION 1..413: note = Table 20
MQIKRAHVIRLKPNREQESYFRRACGVRRFVFNWALNQWEAWRTLYEKTPGRPRRPGWMKLDKYFNSIKDGVCPWVREVSAHIPARAIRNADDAYQMWFKAMQRADTQWGRPRRAKHGVNERFYVHNQQLRFGDGRVFIGKCGWVRCREDFRFPDAKILGGSIRQRADGWYLSVQCEFDVDDPVEHAGAPVGIDAGVTKNFTLSDGTVLHLPRERMQELERKIKRAQRVASRRWAGKPKKGHEAKALRNEDGKLLPKSNRFQKAQKRIAKLKLKQARIRQHYLHLFSRQIVDNYSTICVEDLTLKNMTKSAKGDAENPGTNVRAKAGLNREMLNVAIGEFRWMLDYKSAATGAMVIAVDPAYTSQTCSQCGHVSAANRRSQSSFCCEACGFADNADVNAARNILKQGTSVESQ

SEQ ID NO: 3469 - protein, 245 aa, unidentified
  REGION 1..245: note = Table 20
MQVKVEAQEPRPVDLNKGAAGDVGIVHFISMNEGTFVDFPHFEKVRKIENKIGELQRQAAAKKKGSRRYRRLQFRIAKDWRKITNIRKDFLHKLSRHIESQGYDYFVVEDLNMKNMTASAKGTIASPGRNVRAKSGLNRSILRMGWYTFVCMLEYKMRLSGRFVIKVNPRNTSITCPKCGNVDKQNRRSQAEFKCTKCLLTLNADTLASINQLRAGRAQMLALCSKGEVTLLSWGEDENLPIPAP

SEQ ID NO: 3470 - protein, 416 aa, unidentified
  REGION 1..416: note = Table 20
MQYFKYKLKPNKAQKDVLNQWIGACRCLYNIALEQRKMIDCKEQKARSFATLEIRSKLDKSDIKSWEKYHSINYDYQAAELKALKSEFPWFKDVPGQALQYSLRHLDTAFQRFFKGEGSFPKKKKKTQRAGVKIPKGRTKKNPKGNFQVLEKHINLPKMKDPIRFIRSRDMEGEVKSLTITKDGDSYFVSILCDVGDKYDGLSHESRTHVGIDRGIAKSIAISDGNHFDLPKLKIKKLEEKIAREQVKISRKTKYSINWYKSKRKISRFHKKITNIRMDSLWKEAVRLSKNHAVIALEDLKIRNMSRSSKGTIDNPGKMVAQKSGLNRAILREGWYDFAQKLEWQAKKRGARIIYCDPKYTSLTCNKCGHRAKENRQSQAEFQCEICHHKEDADTNASRNILDKALGTGVFSLEAS

SEQ ID NO: 3471 - protein, 415 aa, unidentified
  REGION 1..415: note = Table 20
MNKEKKDTEMITYQFRLRPTKAQTKILARWMGACRFLYNCALEQRVMAYEMTGKSLNYFSQQNELPDCKKIEEFSWLKEVPSQSLQMSLRHLDRAYRNFFEGRAGFPKRKKKGRCTDAICFPQAGKIQVGKITNKKSVISGLPKLKGGIKLIQHRPIEGKPKVATISRKAHGEWYISITCEKNVADCSAHGGELSVKKAIGIDLGVVKTIVTTKKDHNLDLRKIKQLEKEIAKIQRRLSKPEVKKFSKKWHYYQKIVRKKHTKISRIRKNFLHEVSKDICKNHAIVCMENLKVKNMSKSASGTIENPGKMVSQKSGLNRSILRQGWGMFRQFCEYKTKRYGSHLELVSPKNTSRICSSCGHTCKENRLSQSEFLCQNCGYEENADKNAANNILALGLESMGLSTLEALTIATSVA

SEQ ID NO: 3472 - protein, 413 aa, unidentified
  REGION 1..413: note = Table 20
MKISKTFKYRLIPSQDQDAHFSRWAGCCRFIYNWGLAARKAEWEQKNGHLSYVSQAAQLKELKRLPETEWLSEAPAQVLQQSLMNLDQAYKNFFTKIKNGQVGKAAGFPRFKKKGKSVDAFRFPDPSQFQLKKVSDTKAVIKLPKIGEVKLYLSRDVEGELRNCTVVREGKNWFISLNCEVENDYSASVQERTEIGIDRGIVNTLVTSEGKIYQLPIGKIKTIEQRRSVLQKRNCKKIKFSKNWIKGIRSISALDRKISRIRLDFHHKISTEIAKNHSYIVLEDLNIKNMSKSASGTIENPGTNVNAKSGLNRSILRQGWYTFQTLLEYKSHWYGGYVKYVDPQNTSRKCSHCGHIEKGNRLTQEKFCCKNCGFELHADYNAAINIFTRGHRGSACGDADVSWVDEARTTSCA

SEQ ID NO: 3473 - protein, 407 aa, unidentified
  REGION 1..407: note = Table 20
MEKINLAYKFKLNPSESQIEIFSSWAGTCRFLYNLCLEHRILSWTQYRSSINYYDQANELKDLKSCEGFEWIKDSPAQILQQSLKDLDKAFKSFWRSGFGFPKYKKKGIGDSFRFPDAKQFSVRKVTRKKAFVKLPKIGEVAFRLSRKIEGKIKNATIKKEVDGWYIAFCSEKHLEIPYNNLPTVGIDRGISETLVLSSRDDCLRNLKFTLPKNCHILRERIKVLQKRLRLKKKFSQSWKKVNNKIRKLHSKIASIRHDFLHKASSYIAKNHSYVTLEDLKIKNMSKSAKGTLETPGKNVAAKSGLNREILFQGWGIFALQLSYKCEWNGGHLELVNPKFTSTRCSECLYNNKMNRKNKHFECLNCGHKEDADLNAAKNINRVGRTQRDCGGVGIGQTVEAVTPTVH

SEQ ID NO: 3474 - protein, 527 aa, unidentified
  REGION 1..527: note = Table 20
MIKEEPTEKPKKKQGKSKEEKANFLCKTYRFRVREKQISSSLWQFIHQSVGNQRFVYNHFLNRMNQFWLQQITLKQEIESQNKPLPEGFKTFLTRYEMEAELTVLKQTKILKEITDENGHTEVMEFRHFLNDTHSQPFQSTIKQASEAMAEFAKKKRGKPQFRKKGECTESVFYKQLYSHTVNRKKGYVILPGSKEKLPVHFHRTFKSREIPKTMTLKCDNGKWFICIQTEYKLSRKDHDKREYNRNNVSVNNILAYDLGVNKMIVSHEGDYIDYFTKTKLSLDKLAKRLIVLQRKLSHKYEVRKKQKQKFKDDAEKIAKLKYSSENYKKLQSRIQKLYAKIHRIKVDFLHKVSHCMSKNHTHIVREALAIPQMTKSARRLKLENNPRYKEKLAQRFLDKPWLAKVYSERKQNRKLLNKNWGMFNFFLEYKLAWNMGFMHKVNPAYTSQTCSVCQHKSKDNRVSQSLFICQQCGVKAHADVNAARNILFKAFSPLREVVGTDIPQLKRINSYLQRNALSSDQTEIHI

SEQ ID NO: 3475 - protein, 510 aa, unidentified
  REGION 1..510: note = Table 20
MLKNKTPKKMRQTDDEKENLIMKSYRFRVLENKISDTLWNYLKQSFGNQRFVWNHFLREMENHYQSQNELKKYYKENNIEIPKTFSTTLSFNDLCTRLTMLKNITTTETYLNKRGKEKIRTIKHFLYNTHSQPLQSTLRNLSDAMEDFRKGKKGKPQPKRKIDSFESCFFKQFNSIHVDFKGGYIILPKTQEKLYVNFHRFWKNNETPKTLSLTWNGKKMFVSIQTERKITQQEKDIKQDNLYNVNPHTTLAYDLGCNKMLVTQSGKVYHFSKTQEDKLKLIAKKIIFLQQKLSHKLEIHKKRKAKNPDIKYSKQYLRIKAQIQKLYEKSTSIKKDFLHKVSHDISKSHTCIIREDLKIKEMTMSKRRQKLILNPEYLEKLAIKKKKNPFLRAVYDRRNINRKILGMSWGIFNKMVEYKVKNNMGLIIKVDPAYTSQCCSQCKHVSPDNRISQEQFHCQSCGFTCNADHNAAINIYEKGLLSLPTGSVAIKMPVVSFLKEQRQNFYCLKQ

SEQ ID NO: 3476 - protein, 442 aa, unidentified
  REGION 1..442: note = Table 20
MPETVMTLKVRLKTPEKAADKLRRAMGCARFVHNYLLFETKTDYEDYLDELESRLIFGEAHSAGEAQALCVRPESVTKFSLTYRIKTLRKQYPFLASDAPAQVLQQECQRLAGAFKCFSEGKSGYPRFKRKVENESIRYPQFVRFNLKSRQLFLPKLGWLNVFNKKLPLTPGQAKGIHTATVVREGNRFYACLEYTVTVPETRSAEELSRECTGLDRGVVIPLQLSDGTQYGTELKERTGPLTEKIKLLQKRFKHKTRGSRSWRALKKRIAKLQLKIRSIRRDILHKATTEIAKSHGCICMEDLKLKNMTKSARGTVQEPGSDVRQKSGLNRELLLRALGETGVMLEYKLRLRGGLLIRVPPQYTSQTCPVCGHVSENNRTSQSEFVCEKCGHSANADLNAAENIKRAGRARIAGDAGSKGAVTRNLPESGLKTAQPEAHEL

SEQ ID NO: 3477 - protein, 432 aa, unidentified
  REGION 1..432: note = Table 20
MPEIMRLAFKYKLRPNRKQEQAMRNFSGCCRFAYNALLAQEKEEYQEYLEELESRLCWGEALSKDEAKALCVKPKLNQYTFNYALKKLKEEYPFLKEYCHSQLLQQKVMDLYEAFKKFFKGTGGYPKFKKRHSDDGFRYPQGFKTDEDNGRIFLPKIGYIRYRNSRKIEGIPKNVTVREEADGWYVSIQCEFALKPEISIPDIDTAVGIDMGVKRFLTLSDGNFINNLEEKLKPLENKIALLQRRIKHKVKGSNNIKKAYLKLTLLHKRKADIRNDFLHQVSTLLVKNHDVIVIEDLKVRNMSKSAKGSIANPGKNVKAKAGLNRSILNEAWHKFFTYLEYKLKLKGGILIKVNPKNTSQTCIKCGHISKDNRTEQAVFKCIKCGYEANADHNAAQNILRRAGLARMACQANLIRGRQQEPSEAYNSSSIVV

SEQ ID NO: 3478 - protein, 443 aa, unidentified
  REGION 1..443: note = Table 20
MITCQAFKFKLKTNEELENKFAQFAGSCRFVWNKAIALIKQKLDIKKVDKIINIHLPQYYKNTATIPTYNEMAGMLKLWKQSEEYAFLKEAHSQILQQTLKDLYKAIDSAFTKGNGISFPDFRKKGKSPDSFRYPQGFKINNNRIFLPKIGWVRFYKSRNIVGKPKNVTVKRYADGWYISVVTEKDTSIKENLSNPVGIDVGVKKIITLSNGCYFEPLDLSKYEKKLIKLQRQLSRKQHPTKKGDKTPFSNNYKKHQRKIAKMWLKIANVRNDYLHKITTAIAKKHGFVAVENLKVKNLTKSAKGTKDSPGRNVKAKSGLNRSILSRAWGRFFELLEYKLQRNGGKLVRVDAKNTSITCPLCDYTNKENRKNQAVFVCKKCGFTSNADLVGAINVLMRAMRKENLITLPQGLREVTPVEYAREYTLKQEPAGNREGLPLPSIA

SEQ ID NO: 3479 - protein, 400 aa, unidentified
  REGION 1..400: note = Table 20
MNKKQAFKFKLKTNKHQNDIFYKWSRQCHFLWNTMLAKNLYILNNNRKVWKLRGNKWLRVWENNPMNYYEMNWYKNHILKKTEQCQFLHEPPAQSLQICLKKMHLSFSTFFKKCFEGSGKPKFKNRRSKLSFSFPYTNKQAKLNNDSISIPKVGRICFKRHREIIGNIKNITISKECNHWYISIQTEIEQEQPVIQEEKSIGIDLGIKKTIQCSDGKEYSGDKTKYQKIENKRIFLQQIQSLKRKFSNNWYKVLDKIKKLYKKSSDIKKDFLHQVSTEIVRKYNRIHIEDLKIKNMSKSAKGTIDNPGKQVAQKSGLNKSILEQGWGMFREFLQYKLDWIGGRLIKVNPKNTSIKCSKCGYTDKENRPTQELFKCLSCKYECNADLNAAINIHAVGLLVC

SEQ ID NO: 3480 - protein, 446 aa, unidentified
  REGION 1..446: note = Table 20
MTVNKQIMKSYRFKIMPNNEQKELLSQWFGCRRFVYNKFAEIQKKRKENGEGYLHYTELDKFLSPWKKNEFPFLKDVNSQALQQVSKDSSRAVNTFFQRLEKGKGTNTFNFKKKYDSKQSISFPVYNNNTRFIHNYKVYKKAKVCYIQIPKMKDYLKVLKHRNFEGEIKNVTLSKEGDCYYISLQTKQSIVIDSNDKPISTIGIDLGVKKLVTTSNGEVFRPLNAFKKNQNKLARLQRKLSRCTKKSNNFIRLKKRINKLHKKIVQMRKDYLHKLSTYLVNNHAIIYIEDLKINNMSKSAKGTIEKPGKNVKQKSGLNRSILEQGWGIFSGMLKYKQDWKDQTLEKRQAAFSSQECCLCHSKRKSNRASQAKFACSNCDNKINADLNAALNILYRGLVKSGLTKEEAQEIVGSKIIKRLKYTNLWIQEGKASVRGLSSGCKVASAA

SEQ ID NO: 3481 - protein, 399 aa, unidentified
  REGION 1..399: note = Table 20
MICVIIPKYDKGVKMLTAYKFRLYPTQEQEEFFFQCFGAKRFIWNKALDLCKTRLYNGDYVPSFFELNKMLTLWKKADEWSFLRDAPKDIMQITLDDLSKAFGAMFKGQRREPRFKKKYDTYQSFTVIASAWVKDNVVKIPKLKEPVKFRRSQRVKGKVKRVTVSFDGFQWFVSILADAADVIKPSKGKTCGLDIGVKRLATLSDGTFVSPIHFTKDIQKLEKHQRSMSRKIKGSARWSKAKSRVQKAYRRISNRRKDYLHKASTAIADEYSTIFIEDLNIKNMSKSAKGTADLPGKNVAQKRGLNKAILSQGWYMFFEMLSYKTEQRGGKVLKVDPKFTSQICSNCGYKSKENRESQSMFKCKKCGNTQNADHNAAKNIYARGLRVNAQGKGSYNELD

SEQ ID NO: 3482 - protein, 524 aa, unidentified
  REGION 1..524: note = Table 20
MTQSRGKPRPSGRGRIARTAWPSLSWLLVGRLLLFDVLANHPNGGSPTTSGKVAGGPERSFPQFFLNPRVFFPPDQSTGDTLQAVDQGRNRNLRRIMDQQVNMVVFPVELDQSRFKVMTDRGEDPLQILQDFLREHATPVFCDKDQMNVQKLVWEQRKLSRKYRKGPKSRNYRKQKIHVARAHERVSNMRLDFLHKASTSIGETQAIVYVEDLKIRNMTRSAQGTRENPGKNVRQKAGLNRSILSQGWGTFLSLLEYKLLRRGGRLVRVDPRNTSRTCFACKHVAAENRPDQATFRCVLCGYEDHADTNAANNKEKNDVPEVQPMWRNPDSGRTGRREKGENMTHETWILTYCGHHLDLHRPDPEKIEIEDIAVGLSRECRFSGQTRAFYSVAQHSVLASRIVPEAFALEALLHDATEAFIRDLPYPLKTLLPEYRRIERGLDLAIRLRFGLPETPSREVHLADRILLATEKRDLMPVDPTPWNILEGIEPLSDPIDPWSSVRSMGLFLHRFLELSVNEVVRVV

SEQ ID NO: 3483 - protein, 263 aa, unidentified
  REGION 1..263: note = Table 20
FEIEQPAMKTLDVGIDLGVVHAVTTSDGRFFDLNTEVIKAQELKIAKLQRQLSLNASSRKKLAKKKLVEAFDKHHPSRKRRILLHRLQKAHQKIRLIRQDFHKKTAYILAQEYGCVYAEDLRVRNMTKSAKGTVENPGKNVKQKSGLNRSILRTGFYDFRRSLEWALQKEGGLLITVAPQYTSQTCPHCGDCDSKNRPKQAVFHCVRCGYEDNADVVGAINVKKKGRAGPTAHDKKRIACEVNGEHAGNDEQLISNRNHPCET

SEQ ID NO: 3484 - protein, 479 aa, unidentified
  REGION 1..479: note = Table 20
MQDGFRFRCYPDKAHQKKLMPWIGHQRFIYNAKISEDRYFQRFKNRFREEIEEEVPIDQQYSHFITELTPWLRDVPSQVLRNGVVRWMQAYRRFFKKLGGRPTFQKANRKQSVWLTSELFSICRRNDRWFIRIGTKKFKIGEFEFVPHREFSRLPASVVLSVEGGHWYLGFSNEDDQYEPTRDEIGEYLETFTCEDLLERTIGIDRNTPAGKQVAVSSGQAFAYGETQKERMEKKERHNKRYQKRLSLQTKGSNGWRKTRKRIANNNRYTRNIRRDVMHKASRELVDNPRVYVLAFEDLRIQNMTKSPDPKQGPETGKWLENGAAAKAGLNKAILHSGWGLLYTFTRYKAQRAGKLVVQVPAPGSSQECRLCGFTHPDNRKSQSDFVCQRCEHTENADFNASGVIKTRGVKVVLSGQWREKPPQKTLRLKKRQVGPEGSEPGQSTVRSPVETRGKPRGRKRLNAPVEETGNPHYNASGV

SEQ ID NO: 3485 - protein, 498 aa, unidentified
  REGION 1..498: note = Table 20
MHTGYRFRCYPSKAQAQVLLRWIGCQRYLYNAKVREDRYFRRFQRTALALAGQQAPIDQQYSHFKNRELTPWLFDVPTQVLRNGAVLWKRAYSRYFQDLGGKPTLHRKRGRQSVWLTNELFQFRPAVPHTTGQVAYQLMVGTRKFPVGRIAFRAHRAHPVPASITFSVDHGRWYLSFNVDDGAPQTDPQRIAARLALWPHDALSSASLGVKRSAALSPLCTSAGQRFDFPDVQKQRLAKKEQARSRWQRAMARRVKGSNGWRKARKRIAGYQQYAQHVLHDFAHQTSHRLVTDDAVQLIAFEEGRPVAANGPSGRGGARLGRSFVRAPLAARALAGALNKTRDFTRYKALRQGKLVVDVDPIGAAGTSRVLPTVRAIRTSQACGSCGCALPGNRSDQAAFTCPRCGYDTGSDTNAARMVARRAVAMILSGNYAPKQKKRTMQLRTRVGVERPEPLREPAITPMEIVARRDAGNCDARRSRKSEATVARHAPQRMAGSQ

SEQ ID NO: 3486 - protein, 484 aa, unidentified
  REGION 1..484: note = Table 20
MLTGVKFQAHPTDELRLILSQWMGCQRAIWNAKVQEDVYYRGLCRKFFPKEYAYGLHDQSYSQYKDKELTPWFYDVPSQILRNGAVRWYQTFINFLRGVCGRPRFHAKKDKASVYITSELFRFVKHPKSDETCIELGTKSKPIGLLKFRAHRDYEFPRSITVSKRRGRWSVSFNYTDPLIDDNALLSLEQQLEQLRTLDEEDLGKLTLGMDRGVSITCATNDKGLGNDGNFSYSDKQLKRFKHLQTKLKRLQRRLSRQVKGSNRYNKTKFRLSKVHEQIANTRIEFAHQTSRKIVDSDNQVFVLEDLKTKNMTKRPKPKRCEKTGKFLYNGASKKAGLNKAILHAGWYRIGLFVTYKAAKLNKAVFKVPAHHTSQECASCGHTHPDNRQTQGKFVCRSCGRAENADTNAAKVIAKRAIKLIKDTGTVLDGNLLTTEAALAKKGKRRKSSSAKPSTGRSKEHGGDIRRLEPCESRNPEGKDTLCQ

SEQ ID NO: 3487 - protein, 360 aa, unidentified
  REGION 1..360: note = Table 20
SIKGLCGRPKRKKKTDKGSIYLTSDLFEFRTENKKRKLFIGGKKFNIGSLNFKAHADFNEPKSLYIRKERGQYFISFCYEDGLEQDSFTPKEHLDYLRGMTTEHLQKTVVGIDRGVTIPVHAGHEQFDFSKEQKNHLSKADRYIKRLQKKLARQEKGSNRRAKTKHRIAVHHAKKANIRKDFAHKTSHALVNGFGKVFVFEKLNTKQMTKKPKPKKDESGRFIPNKAKAKAGLNRAILNVGWHKIATFLKYKAAKSGKAVFTVNASYTSQECASCGHTHPDNRKSQEKFKCVSCGYSDNADHNASIVIKNRAIKLILDSGTLLDDNYLSSSGRGGIRKTKKSVKALSRIASETSKEKCAT

SEQ ID NO: 3488 - protein, 442 aa, unidentified
  REGION 1..442: note = Table 20
MGGAKFVWNAKCDEDRYLRKFARKHLSIGTYPKPDQQYSQYKDDVLSPFLKDVPSQILRNSVSNWYASYQQFFKIPERGRPKRKKHGRGMTIHLTRELFRVDNTSEGLKLFIGTQRNNIGYLAVNWHDKKWLQYGLPNSLRIKKLPSGEFTVSFCYGKEEKKNAEKSDRKEWLEYIQKNKTQDELESEIVGIDRGVKIAVATDEKDLHFKDHALSGLKRYQNRIKRQQEMFARQKQKDSKRRQKRKLKIAKLHKKVANIRENSIHHITRELVDLEDKKIYILEALLTKNQTKSAKGTKKKPGKRVKQKSGLNREILNVAWHKIETQLKYKGRRKGKVVFKINPAYTSQECANCGHTHSDNRLSQSEFKCVSCGHMDNADRNAAKVIKKRAVKLLLNSGTELSDKGVLRPKSDSGRGAKIRPDAGKPKRAQVSSRQKRKRVAA

SEQ ID NO: 3489 - protein, 468 aa, unidentified
  REGION 1..468: note = Table 20
MEAMKAKIYATPEQRATLLKWVAGARWIYNSKVNENAYLSTFARKYMPIGTYPDIDKKFSHFKSGDGEWLKEIPSPILREACNKWVDGFFRYLKSLKSKKKDGRKVGKPKLQRRDRGGDIVLDSTCFKIEKQTESHVYLLVGQKNNNIGILKVKRTKRIGDVSSARQIRISYRKGIFTLSLVFGESEDAYVSYANDTIQYLKDNESLENLLETSIGVDRGVRTPFETNLKSYDLTNSAKRKVNGKERFIKRQQRKLHRQVKGSKKRNKTKAKIQKAWVQIHNIREDFSHKVSHDLVVKSSAKIICLENLNIAGMTKSSKGTKAAPGKKVAQKRGLNKSILSKGWGSTAAKIQYKAQRNMKIVVKINPAYTSQTCSCCGHVSKESRNAKAFDCVSCHYKDDADKNASNNIRMISVALIHLGQRLDDKGALKMPESSKDRGEFSKTLEALRTLKQGSMKREPISKALPKV

SEQ ID NO: 3490 - protein, 456 aa, unidentified
  REGION 1..456: note = Table 20
MLTGIRYKATPTDHQARTLAQWIGCARMIWNAKCDEDRYLRAFARKFLPVGTYPKPDKAYSQYKTELTPWLKKCPSQILRNSATIWAQTYQDFFKGRCGRPQPKNRIRGNYIWLTRELFQLVKEDGRWVLRIGTKKNDLGELKVKWHRKPRADRLPNSIWIRVEHGRWSVSFSYDDGKLDDNHLTNVEHLRWLRRCSVDQLESLITPLDRGVARPVQTHDATYTVDTTALRKQRGREKYLKRCQRKLARQKKGSNRRKQTLARVARIHQKTASARDDFLHKTSRAVVDSAKVIVLEDLKLANMTKRAAPVPGIAPGCWLANGARAKSGLNKALLGVGLNRLETYIDYKAYRQNKPVFKVNPVNTSRECAACGHTHPENRRTQATFRCLYCGHADNADRNAALVIRQRAICLILHSGTELAGSKKNVLRPGANANPRKTPAAQAASATGGSSKKKAA

SEQ ID NO: 3491 - protein, 473 aa, unidentified
  REGION 1..473: note = Table 20
MLTGIRYRAYPTPEQAQRLAQWVGCARVIYNGKCDDAFYQYRFAKAYLPAGHYPAHDKTYRQYKTELTPWLKDCPSQILRNSATIWHRSYQRFLKGLSRPPKRKSRATGNYIWLTQELFDIRKEGGVYRLFICEGKKKFDLGELKLGWYRNPPAKPKSIWIKVKNGIWTVSFSYEDPVTRNQPVPLELPEHIEWLKGASIEELYAMVDAIDIGVEVPIQSTRATFFFSEREKQKKKNRTKKIKRKQRKMARQALGSKQRVKTKRQIGRLKKKETDCREDFIQKSTHALANNCHVLAMEALKTKNMTRRAKAKQCPKTGKWLRNNRSAKAALNRSMLDISPGRIRTVLANKMYRHNKPLLLIPPEYTSQTCAACGHTHAESRLSRSEFKCKGCGHEAHADVNAAFVIKQHAIDLLLHSGTELLDNGSLRNPVLGAPGAFGQLATEIRRCWENPACASVDTSTKIGSDLLRSSVA

SEQ ID NO: 3492 - protein, 467 aa, unidentified
  REGION 1..467: note = Table 20
MEGIKFKAYPTRDQKRVLDQWMGCSKVIWNAKCAEEQYYRSFAKKYYPIGTYAPIDASYSQFKSKDLTSFLFECPSVIFRNSASNWYFTYRDFIKGKCGRPRFKKKSSSGSVYLTREVFCFKENKNGTKKLFIGSKKNNIGYLSFKAHRNYNLPNSIYIKREASSYYISFGYERENKSCLISPEMRLKKLKTKSDFYLENNIVAIDRGVKIASQVGDISYNLDSNSQTQLNKQNRKTKALQKKLARQRRVLVKRKEKISKRLERTRIRLSRTYQKIGNIRKDFAHKTSTELVKKTSAKIFILEDLKIKNMTSSARGNIESPGKNVKAKSGLNRAILDKNWYMFENMLNYKSQKFGKTCFKVSASYTSQTCAKCGSIAKESRKSQSKFKCVTCGNTDNADRNASLVIKQRAIELIKHSGTELLGSKSGIRKLSSIGLRAKRSKAKNSPCYPCVEESKKTRKTQLQNTA

SEQ ID NO: 3493 - protein, 443 aa, unidentified
  REGION 1..443: note = Table 20
MQTGIRLRAYPTGPQKQTLSQWIGCARVIWNAKCDEHRYYSTFAKKHFPLGTYAPLDQTFASFKDKELTPWLSECPSQILRNEAVKWYQTYQRFFKKLGGRPKRKKKSDRGSIHLTRELFRFETCSEGVLRIFIGSKTNNIGLLSFKAHCRFGEPNSIRIVREAGNWFVSFSYETEEKPAQTEVKVFNSPEEQLQWLREQGEEWLTANIQGHDRGATIPVHSVSTVYDFSPEQKRSKKRLAKKGKRLQKRMSRQLVGSKRRAKTKFRLARTKAKVRYINNDFCHKSSRTMVDGPALINVFENLKLQNMTRKPKPKQDENGKFLPNGSAAKAALNKKMLASGLGRLVDFVRYKSFRAGKLMFLVPPNHTSQECACCGHVDPDSRRSQALFECTSCGHRDNADRNAGIVIGKRAVKLILDPGMGLSSRGVLSKRHALRHRTWSCR

SEQ ID NO: 3494 - protein, 453 aa, unidentified
  REGION 1..453: note = Table 20
MLTGIKFHAKPTSEQAAVLSQWMGCQKFIWNAKCDEDRYLRAYARKYMPVNTYAEPNQTYSQYKDKTLTPWLYDCPSQILRNGTVNWYNTYRKFIKGVCGRPKHKRKSNLGSVHLTSELFKLYRENDRWILEVGTKSKPIGRLAVKFHRDFEIPKSIYIKRNHNRWSVSFCYEDNVVCDYARADHLTHLRGESRESLEDKVIGIDRGVKRPVQFGRTEINYTPQQRKKLFGHERHLRQLQRKFARQNTDSKRRSKTGARIACKKVRQANIRHDYCHKASHIMVNSDKSVLVFENLKTKNMTRTSKGNATSHGKMVKQKSGLNRSILAVGWHKIQLFTEYKAERAGKAVFYVSAHHTSQECANCGHTHSDNRKSQSLFECVRCDHTDNADNNAASVIKKRAINLILDSGTELSDKGLLKPGSDIGRGASSKPVILKRKPPQAMKRQQKIAGLAA

SEQ ID NO: 3495 - protein, 430 aa, unidentified
  REGION 1..430: note = Table 20
MALCGVKFKAHPTHEQKRVLSQWMGAGRFIYNAKVAEHEYFRTFKAHSLALVGVPVPVDQCYSQFKTEQTVWLKDIPSQVLRNAAYRWREAYQRYVAGLAERPVRKRKGNRDSVWLTSELFELKPKTDNQTGDVIGYQLMIGTKTNQIGALSFDARREFESPHSITVSRRNGEYFVSFNYEDGQELATEEELQVEYSQMDEASLEPITVGLDRGVVIPVYPSEGTPFEFTPEQKHTLDQCDRQINRQQKRLSRQVKGSSRRERTKQKLARYHARKADVRRDFAHQTSHRLATSDHRIFVIEDLKIKNMTASPSPQPKADGNGYEPNGAAAKAGLNRNILAAAWGMVVTFLKYKALRRRKLVISVAAYRSSQECASCGHIHPANRVSQSQFHCQRCGHVANADHNGAQVVKKRGIAATPEGQPTGAARNPD

SEQ ID NO: 3496 - protein, 501 aa, unidentified
  REGION 1..501: note = Table 20
MRVGVKFKTNPTSAQKLIFARWAGCARNIYNAKVEEDTYYRSFRRNSLALTGYPLPNDTAYSHLRSEEMPWLDEVPSQILRNSVVNWRDGLERYNKGLASLPTKKKKSNRTSVTLTRELFEFVPQSDGTHQLVIGTKRFPFGVLSFHAHRKYGIPNTIILSRHNADYFVSFNYEVEKVEVVADADLLAHLQTFTVAELLAQTEGHDRGVAIAVQSSDGTAYDFTPEQKRHIERIQVHIKELQKKLARQIKGSVRHTRTKRQISKLHATLANIRLDFAHQTSHRITNKKVLLHVFEALLVANMTAAPAPKQDETGKFIPNGAAAKAGLNKAILMVAWGMILQFTTYKAARRGALVVAVPAHHSSQECAHCGYTHPNNRVSQSQFVCGRCGHVANADENASTVIKQRGVVLVLSQLLQIKTKKKTGSKLRVRATEAVTNTPAGTRGSARREESQTGTTKALFPAASLKREASKTSEPTAAGWPAENVGVRGSLADYQLDLFSL

SEQ ID NO: 3497 - protein, 453 aa, unidentified
  REGION 1..453: note = Table 20
MLNGIRCRAHPTTEQAKKLAQWIGCARLIYNAKVSEMQYFRTFSRKALGAGQAVIDQAYSQFKDAELTPFLSEVPSQILRNSAVQFMNGWQRFLKGLASPPTHKRKGERDSVHLTNELFRFVDEGLIEIGTKRFPVGTLRFTQHREITEPKSIIVSRKAGRWYVSFNFEDATLAPPRPRDEILADLSHLDEAQLTAMTWAGDRGVRDMLHGSDGQVFHLTVSAVAKNRRRELTKRRLQRRLARQQKGSRRRDKTKRRIAHISSGQAEVRRDFAHQTSRKLVDSPYQVFVFEDLKITNMTRRPKPKQDEATGEYLPNGAAAKAGLNRSILQSCWGNIVLYTHYKAERANKVTIKVHPHFSSQTCSQCGHTSSENRSGKQFSCTSCGFKADADANASAVLRARGAKHIIDGEWREQKAKKTVSFRKRGSERVPQNHVERPVALCAQISVKRGCPA

SEQ ID NO: 3498 - protein, 471 aa, unidentified
  REGION 1..471: note = Table 20
MSSGVKFRCYPNPEQEKILSEWIGCQRVIYNAKVAEDRYFRTFRNHSLSLTGYQIPVDQKYSQFKDRELTPFLYKVPSEILRNGATRFMQAYRRYYQGLANHPSFKKKNGRQTVWLTKELFRFEPDNGHNRLFLGTKSHPVGELKFKAHTDYDLPASLTISRQAGKWFVSFSNTMPEVEISEADLVAHFSSMSASELEPVTLGADRGTVIPLKTSDGESYDFSEIQKQRLRRKEINRKRYERRMARRQKDSKRRQRAAQKIAAYHAYVANVRQDFAHKTSRKLVNSEKQVFVFEDLPIKNMTKAPPPRQDENGKYIKNGAAAKAGLNKAILNSAWGKVKQFTAYKALRQGKLLIVIPPQGTSQECSACQHTHPDNRRTQAEFVCTRCGLTINADYNAALVIKRRGIQDLISGRIVVKEKKRVMRLKKHPDVGREPAEFTRGETNVSRSMGQVCRPQLSVNRETPTTTALAD

SEQ ID NO: 3499 - protein, 526 aa, unidentified
  REGION 1..526: note = Table 20
MFTGVKLPCYPTLEQASSLRQWMGHQKFIYNAKVQEQDYWYKFSKSQLALTGKKPSSDQMYSQFHNDELTPWLSNVPSQILRNGVYRFTCANTRFHKGLGGAPKIKKKHGRKSVLITSELFEYTERAHPRPVNDGPSPFDLTIGTKKFPIGKLKVKAHVSSAKPNSITISEEPNGHWFLSFCCELPSMEFKSADGKEKAPETIIRTHEELMYEYALRSDLQEVTVGMDRGIAIPLAASSGSQFDISDVNRERIEKKDLYTRRFQRRMAKQVKGSASYRKNRLKVANLKAYSANVRKDFAHKASHALVSSEVQVFVFEDLKLKNMTAAPKAKVDDKGRYIKNGAAAKAGLNKALLSSALGLVKQYVAYKAAAVKKLVLSVPAHFSSQECSVCEHVDENSRLSQSIFKCTQCGHTDNADFNASKVIRNRGVKMLKKHLESVNDGTFKAKVRKTVRVRKVKSNIQKVGQILPEPVIQKESSKPVARCGTQILETDMGESVLDVVYDHVVCSAVLVETGNPHLGFGPGGG

SEQ ID NO: 3500 - protein, 450 aa, unidentified
  REGION 1..450: note = Table 20
MLRRWTGCQRTIYNGKVSEDRLFAAQRRLELASGKTDVRTPLDQQYAQFKDRELTPWLYEVPSQILRNGAVRWMTARQRQLKGLGRAPRRRTRRDFNTVVITQELFRFIDTGHGVVIELGTKAKPLGQLPFKAHRPYGLPNTIVVRESAGQWFVSFCYEHTSPFILREPHELAYELNRLDDEAIGQVTLGLDRNVRDNCIASSDGRQFRPDAIALERMRRKDVGAKRYQRRIARARKGSANRRKLVARLVRKKAYAPCARNDFAHKVSHALASSDARFFVLEDLKIQGMTRAPKARLEQATGKWLRNGARAKAGLNRSILQSCWGSIHRYLAYKAARRNKLVGLVPAANTSRECSRCGHIHPDNRKDARFVCQRCGFEAHADDNASCNIRTRGIGRLRHGEYEAVKTRKRVAPVRRKESNTTGGRPAHACEGESPRPEHRIERTQDLVAA

SEQ ID NO: 3501 - protein, 536 aa, unidentified
  REGION 1..536: note = Table 20
MDYPLGISGVKYRLFPTRDQAETLSRWMGCERVIYNAKVNEDRYHWAFKRKAVALAGERTPYDARYAQFKSDELTPWLSEVPSQILRNGATKWHDAKGRALRGEAGQPKLKRKSGRQSVLLTSELYAFVPLATGETSPRGDFVRHKLVVGTKKLPVGEIEFEAHRPYRLPKQIVVSRERGLWFVSFCFGAEAEDWAPDDEADRPWWAQGTHPDLRRTRSERLYELEALGEEALAHVVLGIDRGVINPAVDSRGVFRALDPVVVERIARKQEGAKRHQRRLARQVKGSKNSSKTQRRIARKRGYETRARRDWVEKVSHAIATDDTVQVVAMEGLRIKNMTKAPAAKPDPKNEGQYLRNGAAAKAGLNAAILASCWGLLEERLGKKLSVRDKLLVKVCAAYSSQECSACGHTHPDNRPEQSVFKCLACGFAAHADLNAALVIAQRAVEQILSGSEREAASVDERERAGRAGRKAAAIAAKAAQKEGRKGAASKAAAGNAGVGRSRVPEEGTAVRPGRKPGRAAPLRQETMKSVGCLGL

SEQ ID NO: 3502 - protein, 459 aa, unidentified
  REGION 1..459: note = Table 20
MRNAKTRERNAAYLEGRHHEDSQKYAHLVTEETAFLSDVPSQILRNGAVRFYAGLQRFRAGLGGAPKIKRRHGRQSVLITKELFRFLPMPVTGRSDREGWVIELGTKANPVGRLSFHAHRAWSLPNQIIISVEPSGRWFVSFSYEGEAIEVDRKGAARDLSAADHIRTAEELLYEIQGLPDLEDRVWAGDRGVHTPLAGSDGKTWDFSDVHKARLARAESGKRKYQKRMARAQKVKGADGKSRVSQGYLKLKRKAAKKAEYGRNVRQEFAHQTSHALVASNAEVFAFEDLKIKNMTAAPAPKLDAEGRWARNGSAAKAGLNAAILRSAWGSVQRFTTYKAKKRNKLVYKLPPAYSSQTCSRCGHRDAGNRKGQLFACLSCGHQADADVNAARVLKLWTIEKVRSGDLPAEEQRRKKRVAFARKRTRALEKEHLEVTSDQERTGHLEAGASNGSAFHAVA

SEQ ID NO: 3503 - protein, 465 aa, unidentified
  REGION 1..465: note = Table 20
MIQGKKFRIYPTTTQQQTLLQWIGCQRFIYNAKVGEDRYFRRFARKSLSLCGIPVPLDQKYSQFITQDTFFLKEVPSQVLRNGAYRFRDAYQKYKSGAVSGRPKIKKKHGRQSVLLTRELFSFQIENDIAHLALGTKKFPVGEILMKQHLPVPEAPASISISVDAGRWFVSFATDDGVPDISDAELAADLKQLSEGDLLQQTVGVDRGVAIPAASSNGIGFALFAHEQKKLERAERHKKRWQRIAARRVKGSKRQKKALRRAARLQRYQADVRKDFAHKTSRALVDTDVRLIVFEDLKIKNMTRSAKGTIEQPGKKVKQKSGLNRSILQSSWGLIETYSRYKARRDGKLVISVKPHRSSQECRLCGDIRPENRISQSVFLCLRCGHHENADFNAAGVIKQRGVTTLLAGEIQFKQPRKSGIRKQLGLGRPEVTLGGEDVSRMRQPSQVQTSLNREETPTTTASAV

SEQ ID NO: 3504 - protein, 478 aa, unidentified
  REGION 1..478: note = Table 20
FHDRLLVDVEKAELPPHPYSPARRNFFASWGNRMGGPLDHGGETMMVGRRFRCYPTAEQQKKLRLWIECQRFIYNAKVAENRYFLAFSRASLSLAGVPVPIDQKTAHFIGEGTEWLRKCPSDVRVFAATNWMGAYRRFQRGLSGRPKAHKGKANGSVWISSRLFRFETRATENRSLPGIWVGRPRNPEHVIGHIPFRAHLEFQNPKSVRIVTVAGKWYLSFAFDDGVQIPDVADTIEWLRGFDEKDLLEKAIGIDRGVATPVVTSDGMFLALPAERKRAAKREEAKMKRWQRKIRRRTRGSANWRKACDQVAKLANHAKNVRKDFAHKASRRIVESRRPLIVFEDLKVPNLVKRPAPAQAANGKWLPNGARQKKGLMRGILDSAWGRIDVYTHYKAAARGMLCVKVPPKYSSQECSECGHVHPDNRTSQDTFRCQACGHEAHADLNAARVLAKRGVEMVACTPQKKRRRCGSCGEKRE

SEQ ID NO: 3505 - protein, 483 aa, unidentified
  REGION 1..483: note = Table 20
MTQGRKFSARFSNDASRYGYLTWSAAQSFIYNEKVREQRYFDSLYRLIDETKRHCQPIRPECCVDRPQPDQKYAHLVDFEEMPWLREVPSMIYGIGAYRFCQASRRMLSGLAGRPKVHPIKESDRVLQLTRKYFAIEPHTRKGWFVLQFGSKQKPGGSILFKAHREFLMPAMVFVKLSARGLSVSFCYEDPKDLECFPETEEEISARLMQYTKDELQKKTIGVDRGVARPVQSSHREAPYGLTKKQLQKIASRERHRKRLQRRLAKAKKGSNNRRKVKRRLGRTYQYQRNVLEDFAHQTSHALVSLEDTWLIVLEALKIDNMVKRPAPEYDEETGRPLKNGASAHAGLAESILKSGWGKVRTYLRYKALKAGKLVLEVDPKNTSRRCPVCGLIDPKNRPSQAVFHCVRCGFEDNADHAAAINIRDRGIDMLLSGLYKPKTRKKLLRTKKAKPSSVKLGPDRADVMPVELTAPDKTEVLSACRR

SEQ ID NO: 3506 - protein, 510 aa, unidentified
  REGION 1..510: note = Table 20
MQTGRSFAAHFEDDASREAYLMWSAAQMLVYNAKVEESNYFWKFRCKFWSPEPLPKPDQKYAHLVNPDTVPWVKEVPSAVRGIGAYRFFQAMTRFMRGLSKRPHRKPIRNADRQLTLTRDCFSVKQVSQKWWELTFGSKKKTAGRIRFRAHRRFEMPAMVMITCTNQCLQLGFSYEDELTEFPETEEEILDRLGKLTPEELAERTIGGDVGVKIRLQLSNGESFNLSEIEKTRIARKDFGRRRHQRRLARMKPGSSNYRKQTRKIAKTYVYEKNVNNNFCHQTSHKIAVMEGIEVVALEDLNVAGMVRRPKPKYDDKGRAQPNGAAAKSGLNKAVTKSHFARLRTSILYKCRRNGKVAVFVNAKNSSRECSKCGYTAKENRPSQAVFCCRREGCGHEENADLNASRVIRKRGVKMILEGLVKKKESKKLLRVPRAKKRNIGVDRPESMPAELSVCSCVLHGVGIVAALNQEADAARICKSRSSGLNDMDHPPTQCVTTKRCAIMGVYQLR

SEQ ID NO: 3507 - protein, 466 aa, unidentified
  REGION 1..466: note = Table 20
FYQVFGGDIPKADQKYSHLLTDPYTKKRYVEWLENVPGEVLRNGAVLYIKAVSGAKSGLTKKPRTKRIKAADRSLWLTSELFTIKDLGGRWYELNFVVGKYRRQVARIRFKAHRSFEMPNSVHVKTKGSKLFVSFSSPEASDENRFPETEDEIRARLRMQTPGELLVRTIGCDRGIVTPLQTQTEGFGLKRIEKERMRAKDKRIKRLQKKHARQERDSKGSRKTSRKLNDAHTYGRNVRENFAHQTSHALVSNPEADVIAFEDLKIKNMMAAPKPKYDEAGKPLPSGRSAKAGLHKAIQFEGMWGRTLTYAQYKALKHGKLVVTVPAAYSSQQCPKCGHTHRSNRPDQAHFACTNPDCRFNEDHQLTADQVAAMNIAARAVKQIFDDQQKSKERKRLLRMRKKGESKGQGRGGTPRTVMRSGDVGAAKPVEPMPDTGNLPVSTLAVKPESLDKRVALAGECSSTSL

SEQ ID NO: 3508 - protein, 439 aa, unidentified
  REGION 1..439: note = Table 20
MITGRKYRVKALGKESREMFFTWSAAQMLIYNALVQERMYFLGFFRKFGGKLPPIDQKYSHLINREDGAYAWMHKVPSQIFRNGAVLHKKAWSNYFAGITRQPIPKRVKGADRSLWLTQELFSIKQVSKNWYELSVGTKTISGGRFLFKAHRPFTEPVSVHLKSSGTEIFISFSCEEEFQQYPETKAEKIARLSQYGKDELLNISVGIDRGVVTPFQLSDGRRFDYSQTQKDRLKASERRKKHYQRMMARRIKGSSNWKKAKEKARRCSRYAAYVRRDFAHKTSHAIVGNESVEIIGIEDLKIKSMTARPEPKKFEDEEFLPNGANAKAGLNKAILEKAWGLTERFIEYKAQRAGKLIIKVPAPYTSQTCSRCGCQAKTNRKSQALFRCTHCGFTQNADRNAAEVIKAKAVELFHSEGIKPKEVRRTMRLRHKPACASA

SEQ ID NO: 3509 - protein, 493 aa, unidentified
  REGION 1..493: note = Table 20
MCSLRSKTACELDLFVSCMLRPNDFWRIVRSVEIGRKFAIKPNPAQEKILRQWIGSQRYLFNAKVEGLRYQLALRRLAKAQFPDEAIPFIEFGQEYARFKDGVDFLHQVPPQILRNGGYRFTQAVMRWQKKINERPTKKTRQGRQSVLITSELFSVQGTTLILGSRKFPVGSIPITAHLKFQPPKMISVSVDGNKWFVSFCNDDGTECPSYEELLDLFYSKDKAELDADSVGIDRGVKINAACSDGTNFVFSAAEQKNLLAAQARKKRYQRQMSRRFRPGQKQSANYYKARASKQKAERKIANIRRDFNHKASRKIADGSAHVIVFESLKIKNMTAAPSPKQDESGHYLPNGAAAKAGLNKAILNSAIGQLADFTDYKARQNHKLVLRVPAHHTSQTCRKCLAVDGRSRVSQALFICTSCGHEENADSNASGVVRHRGVDLLLSGHFHEQIKKKPRRTVNLRRAAVCHVTDEADPRGLGATVWQETSPLAQPG

SEQ ID NO: 3510 - protein, 450 aa, unidentified
  REGION 1..450: note = Table 20
MAIRGFCINISERLRSNQATTFAQWIGAANVVRNQKVGEYRKLLSEGRGSEIAQGYSHIKKCSGLEFLREVPVQVLRNAASGVFSDAEAARKGLRKFPKVKGRNKKRSVLITRELFMLEPLDQSSSLLTLFDNATKQRQKLFSLKLPYTPEQLARQFRVSRQGNKFTLSGSFDDGVINDSNDKLLKSYAHLDDETLLGNITGIDRGVVRPIQTSDGLIIQYTPEEVESLRKQARKKARYQRILARKKRLNKNKNKHKCETAGQRKLAAKIAKADAKMADIRKNFSHQASSQVVKSAKLIIGLEDLNLKGMTKRAKPKQDGRQFVKNKARAKSGLSRSLLNVALGRLGDYIEYKAVDYGKATVRVSAAYSSKTHYACRSRDTVRPNQATLICRRCGAEENADENAAKVVAQRTVTYIKENAFADKAKSRKTIVRRKKKVDDPPLVCELASG

SEQ ID NO: 3511 - protein, 497 aa, unidentified
  REGION 1..497: note = Table 20
MKFTRGLSIEITDLLSEQAAMLFARWIGGATVIYNQKTRDNRQRYDDWVSAGRPEAERQFVSQETAYLQQRLPFLSELPAQIRRNAGSHWFSAWNGFTKGLRDAPKTRSKHQRRTALVTNELFFVQPLGDSQCVLHIRASAKKSDRGALVFGLQLPVPAASVANSLFLSRQGRRFWLSIGYDIERDVPTEAEIWEQLRAMTAQELSAVVTGYDVGVINQVMDSDGNRFHFSPDEQRVLARREQLKRKYQRRYARAAAANGRQGNPAKGRAPTRTERHWLGKAATESARMANIRCNRSHHISRAIAEQTPVVAVFEAINHQNLAKAPKAKKCPETGNWLRNGRAAKRGLNRALASVNLGQIRQFSGYKLRERGKLLVQVPQQYSSQTCSECGCQHADNRKSQSLFVCTACGFTCHADENAGRVLKQRGLSLICSSTLPTRKAPRKTSIRRKSAPEPASLDGGGRVRPLGAVADDAIHGQFERCAARTAPLETMPLITA

SEQ ID NO: 3512 - protein, 422 aa, unidentified
  REGION 1..422: note = Table 20
  REGION 50..51: note = misc_feature - Xaa can be any naturally occurring amino acid
DLPAQIRRNAGAKWFESYQASLKGLRSRPTVRAKHKKRNCYVTNELFDVXXLDEDRCLIQLKVNSGKRHRGQYLTGVVMPFAAKAAGKALYVSRKGRRFWLSMSFDKELEVKSESAVRQYAALLTDEELKSQVEGFDLGVKRQVTGSSGDVYHLPGEALVALAKLEDRRARYQRRYARMARANDRTASTVKRKRTGGEKRTQQHIARCSEKRAHIQNNNSHHIAKKIADNTPLIAAFEDIKISNMVRKPKAKLCEDTGRWLASGASAKRGLNKAIHSVNMGQIRQFTAYKLKDRGKLMVRVKPHYSSQECSQCGHTEKGNRPSQATFQCLNCGFAANADDNAAGVIKKRGITHVRSEAFSIEKTPRTLKVRRKKTNKAQELASSGSGDCVRPDVQAVISDALNSRRTRENSCPSEARGLSHE

SEQ ID NO: 3513 - protein, 231 aa, unidentified
  REGION 1..231: note = Table 20
KLTDFKQYQTDMKELLGIEIDEEMDTKRLIPTYSKLYSLKKYSKKFKRLQRKQSRRVLKSKQNKTKLGGNFYKTQKKLNQAFDKSSHQKTDRYHKITSELSKQFELIVVEDLQVKNMTKRAKLKNVKQKSGLNQSINNTSFYQIISFLDYKQQHNGKLLVKVPPQYTSKTCHCCGNINHKLKLNHRQYWCLECGYREHRDINAANNILSKGLSLFGVGNIHADFKEQSLSC

SEQ ID NO: 3514 - protein, 479 aa, unidentified
  REGION 1..479: note = Table 20
MKEEKIVNLGYKYKLYLNKDQMNILNHQMYIYNQAYNICLNLWQKENSKNKDLPKENRVFRNAVSYDTVIKRALRLRKLSFSTVVTQQARINFLKAVKKAFSKETIALRLKAIENATTPKEKAKAFKLGMPTFKSSRDIFQSFNWNNQGYQILDDINSNSRYKTLRLLKTNLRFRYHREFPNNYKLSSITISKDSTGYYVSFGIEFKNKIDLVVSKDNLDISKSIGIDLNSYNFAVSANVNFIQDSNISKVTLNHLIDNGATNRKGLKYAKYVKLLERKQSRRVLKELKNSKVNKTKIKLGSNHKKTQKKLNKLTKRIANQKIDLYHKITTQLTNKFDLIVVEDLKTKNMSKSSKGNEITHGKRVKQKSGLNRTILNASFYQFVSMIQYKTIMLNDKLFVKVNPQYTSQECSHCGNIDKNNRSKQDKFKCIACGFETNPDIQASQTILKRGLESFGLGTSLVDLNKHKAFRSTSLEVAS

SEQ ID NO: 3515 - protein, 454 aa, unidentified
  REGION 1..454: note = Table 20
MSIDKVTVGFKTRIHLNNKQISAFETWSKARRRAFNFALNLCEIYLERIKVTGEDNKLITEINQFDKHFNASKYPLGVVKKGKGGGLIGTGLNSWIREQNVPSTACQIAIKYDLINAWKRCFKKLGKQPRYQGCKRRDSFTLSSADLKPQFINGTRLTLPKSLGTATLGDAIPYSEYKLGNTAFSCEGTKWYVSFTLTVPADQYYKQLANRKHIVGIDLGVKIYAAESSGKTHIAPERLTQLEQRKARINRKIGLIVHKNLMLTVSTCDRCSDLVKGMADKKRLCRACQQKFYPLMRSRKVTKLRASVARIAAKQADIRNNMAHQLTTDLVNRYDFIAIEDLKIANMTKSSKGDVDNHGKKVKQKSGLNRVILNVAPFKVRQMLNYKADKFGGAIIAVNPAYTSQNCSECGHKSADNRKNQAVFQCVECGHTANADTNAAINIKDRGIEKLKGS

SEQ ID NO: 3516 - protein, 401 aa, unidentified
  REGION 1..401: note = Table 20
MATASKKPHRIAHKTRVHLNNKQRSWMVANCVGCRLAYNYAIEQMNRAYQARKYEPDIPHLSPKDIRKMWTVERYKRYPWMENQRLLLSALNNAINVNYAAALNQWKKSHWNVDKIPRYHGRRTSLSVMMDYTAIADKHIDKKTLQLPQKMGTCRLAEPLRFKGTLKQATFSESGGKWYVSFLLAVDELPERTAAATGTSIGVDMGVSKFVTLSNAEHIEMPPQLDEAREHTKKIQRQLSNKQGPVKRKRKASKNWLKLSRKLSAAHRKTANIRRNTMEHVTKSLAEQYETVVIEDLKVKNMTGSAKGDADQPGTNVAAKSGLNREILNNGFYQFRELITHKAAKVIAVDPKYTSQTCSQCGVIDKNSRLSQSEFKCTGCGFEINADVNAAQNILDRALSQ

SEQ ID NO: 3517 - protein, 443 aa, unidentified
  REGION 1..443: note = Table 20
MALEKLKTYKYRLYPTEEQKEILEREWFAPIRFLYNLALEHRSQLRSQDYDFHSRQLSNEQLREFSNYSQAGAIRSVLKELKGDPDYEWLRKFPSQCIDSLLNDLNEAFKKFFKKQGGRPTRRTFLKNNSAKLKTIGKKKPDGSNYINVLYRKDTVRIPKLGLVKYKKHKKFYGKPTVSTIMREGNEYYICVTTRQTFKAVEHCGTAIGVDLGLAFPSATSDGEILPKNTMLDTIDSRYRKLQKKFSRQENKQSIRRKRTKAQLADLKRKQTRCRKAYIHKATTELTKRYSYIAIEDLKVQNMTKSAKGDAEEHGKNVKAKSGLNRVVLNVAPYEMRSQLVYKAGWYGSHIEDVHTCPECGAIDKKNRKSQSVFECVECGHTNNADINAARNILIKSGMSETALGLRKTPSKNHQVLATSESIVSCFQPLSDCNSNALSSGYG

SEQ ID NO: 3518 - protein, 407 aa, unidentified
  REGION 1..407: note = Table 20
MTPSENPTQSDDLLSSAHTETARHNVRCYPTVEQQAQLTIEFEACRLVYNLSVEMARHAYAQGEPYPGEKGFKKAITQWKKTTDWSWSRLASVQCLQWAAKHADSAFKHFFRRCKAKQEPGFPRFKKAAHEASATYNIVHCRWSEQTGELVLSKQKTPLKIRWDRRGTPQQAKSVTIRRDAAGRYFASFTCQKAIEQLPAATAAVGIDIGVTHALALSTGELVDAPAFLSPQRQRRLLHLQRKLARQDKKSHSRERTRKAIARLHARMADSRTTWQHKITRSLVMRFQAIAFEDLNIKAMTRSPAPQQDPATQRYLPNRSSAKARLHALMLNVAPTSLRSKIEYKAKWGGRQTQAVNPAYTSQKCARCGHISAENRKKTRFLCVKCGYIEHADVNAAKNILAHAFGA

SEQ ID NO: 3519 - protein, 382 aa, unidentified
  REGION 1..382: note = Table 20
MHKTAGCCRLVYNHFLALAKKNKDFNYNKYSKKLTMLKKDANYFFLKEVPSQPLQQSLRHLDDSFKRFFKKQTNFPVFKKKFVNDRFTYPEGVKLNPSFTKIFLPKIGNMKFKTSKKYLKLLKTHEFRTCTVTLAAGKWYISILIDDNTVPQPAVKINKTVGIDLGIKKYLVMSTGRTISAPNIINKLKEIDRLKSYLCKKVKGSNASKKLQLKIQRKQKYLNDLKTDFLNKLVDYIIKNHDCVILEDSNIRKMIKHSGDWKSNFNRLMTMIPMYAFRMKLEYKAILAGKYCVAVNPANTSRTCSSCGHVDKKSRKSQSEFECTRCGFSANADLNAAFNIHNVGLNALIAAGHAVKSAHATASAVSEANLSAVSPSSFGFSA

SEQ ID NO: 3520 - protein, 409 aa, unidentified
  REGION 1..409: note = Table 20
MHIAFKYEIFPTAEQRALLPQLYGNVRFVWNKALEMRRKVHDAYGYWPNYEEMAAWLPGWKVDYPFLELGDSTSYQQTLLHLSKAIKDYFKSKLGLRKGPKLGFPKRKRRKNRWSYKTVSKSVKIENGKIYLPKLDLVEIRQHRPLQGKFVSATVSTDKDGRCFVSICCNVNKIESLPKTGRIGAFDLGLKNYATSNEGEKYQGYKLNKKTEDHLVRLSQNLSRKTKGSKNWNKARIRLAKAYSKERKRREDTLHKLSLQLVKEYDIIALEKLNVQSMVNRKKRKIKRKKTGMPEWYYRQQAKSIANASWSRFASMMQYKAEWYGKKVVFVEAAYTSQTCHKCGYVNEAVADLKVRNWTCPHCGARHDRDINAAKNILQRALQPAPARTARAACPQGQENAPLEASETV

SEQ ID NO: 3521 - protein, 371 aa, unidentified
  REGION 1..371: note = Table 20
MSVNYVTRGYCVPLYPDCLQRIMLAKTFGCVRLVFNHFLDVQKNNLINQGHIYTKNEISHMLTLMKKDGQFSFLKEVDSVALQSSCENLNWAFMKFFNEHKGFPRFKKKGYYSTYTAKNNNNCIRTGNNCIRLPKIGWVKTKLYQKIEGHIQRVTVIDHGDGNYSLSICATDVPVETLPSTGKRIGIDVGISELLTLSNGDIYDNKRFYASTLDKLIVQQQKLSRMIKGSNNYERQRRKVHKLHKKIRNQRTDYYHKLSKQLIEDYDVIAVETLDIKSMMNGKVSNLNLSDASWSRFLYMLKYKAEWYGKRFIRINQYEPTSQKCHVCGYINKGVKELSIREWECRQCGAKHNRDINAAINIIKAANIATL

SEQ ID NO: 3522 - protein, 384 aa, unidentified
  REGION 1..384: note = Table 20
MVLINKGLEIRIYPKDELIPPIHQNIGNARFVWNKVLERYNQMYEEAMENGKEIYPSLILFNNILKDLKKEFTFLKDSESTSLQQVLRDLSQSFTQFFNNTSNYPTFKSLKKTKKTFRVQNNNNSIRVENNKLRVPILGFIKYKTSDEYQIYLHTSKINNATIKFKNGKYYAVVNVEIDYTPWPHCRGNVGIDMGMKTFATLDDGTKIANLDLKHENEMIEKYQRKMSRQKYGSHNYYKTLQKYWKWIDKRNNKLDDFLHKISYTIVRNHQNIFMETLNIKGMMQNKKLAPKLQAISISKFISMIKYKCHWNNRNFIQVDTFFPSSKLCNVCKEKYEELTLDIRTWTCPHCNTEHDRDINAAKNILYEGLKKLASNLLDETTIT

SEQ ID NO: 3523 - protein, 454 aa, unidentified
  REGION 1..454: note = Table 20
MISFQMLSHFLYICCLLIIVNMSSCIDENNYCGGKQDVTEAVKIRLYPTDEQKKIINQNIGNRGFIWNKLLVKIKYENVKPTQKNLNNILKELKNEYPFLEKSESSSRQQVYRDLIKAYNKHKKEGAGFPKFKSEKNPNTSFRIQANNNNIHLNERKNRIQIPTIGKIKFKTSKEHKQKIQESKINNITIKHENGIYMGIININTINTPLKYCFEAVGIDMGIRRPLTCSNGLKIEEFDLTREEKNVKYYQREMSKKQPGSKNYCIAQKRYWKALNKKINKKNDQYHKITHHIVKNNQVIVLETLNIKGWFKNKHWAPKLQRISLYEIIRQLKYKSERNNRKIIQVGRFFPSSQKCSNCGYQYYDLELGEEDWICPVCGKHHDRDLNASINIKNEGLRLILEKIIKTISYLGLSWPAVRGYRLESINIPLNKEHVKKSRIPNFLKVGGSSSPIL

SEQ ID NO: 3524 - protein, 335 aa, unidentified
  REGION 1..335: note = Table 20
MKMLRQDNLFLEKIESSSRQQSQRNLIQAFKNFHNPNLKSKYPQFKSKKNSKDTFRIINNNNNVRIQKDKYGFDKIKLANQGLVKFKTSKEYPNILRQTSNPDDPAAKIKHVTIKKENGAYYAVFNIECVHVPKRIIGPLQQIGIDIGCGKLAVLSNTQEISNLVLTEETDKIIQYQKEMSHHTPGSIRYNEAQRLVNVWFTKLVNKRNDYYNKQADYIVKNCCFVAVQNENIIAWKHNKYLSRSIQLNAPRIFMNQLDYKCDWNEVEFIKIPKSFPSTQICSNCKEKNENLRGWKNIGIREWDCPYCGEHHDRDVNASINILNRGLELVGATGQ

SEQ ID NO: 3525 - protein, 411 aa, unidentified
  REGION 1..411: note = Table 20
MRIVNKGLVVRLYPDECMVREFNQNIGNARFTWNMLLEEYQKTYELFKQHGYNRLKCNMTTFNTMLTMLKKWYPFLYLSESSSLQQVYRDLLNAFKKFFNEGAGFPCFKSKKHPKQSFRIQNNNNIKIKDNILVLPKIGKVYYRTSKEYKRLLNSNEIKINNVTIKKSNGKFYTVFNIEMPVESFEKTFLSVGIDLGLETLATLSNELKITNFDLTYEEKMIKKYQRILSRKNYDSNRYRKVQKTYWKWIDKKNNKIKDAYHKLSHYLTKVYDIICMEDLDIKEMFQDSDLSSKLQRIGLASLVDKIKYKAEWYDKVFIQISRWFPSSKNCHNCGYYNKNLKRDEREWTCPECGTHHDRDANAAKNIQMEGLRIYHENLVNLRDWGDSTVILEALASTVREVRILELYSSR

SEQ ID NO: 3526 - protein, 381 aa, unidentified
  REGION 1..381: note = Table 20
MDKRVMAIKVRLKPSPEQIEEFHKNFGCVRKVYNLTLNEYNKLYEKDNSIKPTYTFLYNLMMKYKKSIPYLDKMESTSLQQSIRDLTNAFNNFFKNPAHNLPTFHRKKDKKFSFRQTIPPNKKIIEKNKISLRKYGKIPFQTSKEYRKLLNQPGLKINNITIKYDGIHYYAIININYDALKHFELTGKKIGVDINSNKNGWIVTSDGVKEHFDVNHENKMIKYLNQLISPCRKKLSRKKKELLKRLQKQYNKRTNKLQDYIEKLSYNIVKKYDVIVFEKNYAKIKILIGGEQNLIFPLSKFINKLKKKFEWYKPEAEGVVFVDAKNTSKTCHKCGHINENLDVKTRDWICPKCGEKLDRDVNAAINILNRWTPGDCLESTQ

SEQ ID NO: 3527 - protein, 382 aa, unidentified
  REGION 1..382: note = Table 20
MKTIVKSYKIRIYPNKSLQDKLYKNFGYNRFVFNQLLNYNQLIFSLVVNNPRINPYNYIPKVNRSTLNNWLNVLKAEYFFLKDSESTSLQSTCDIFKDSMVRFFKHQNKFPRFKSRKNPIQSIRLKNNNNSIRFENNKLKLPRFGLIRYRDNRKIKGDILSCTVKCENNRWFAVLNCKNVPVSPMLKTGDNVGIDLGLKDLMIFSNGEKRKPITRLTKIEHQIAKLNKKLSRKVKGSNNWKKIVQKLQKLYNKVFDIRNDEYQKLSTELIKSFDLIGLEKLSVKNMIKNKRLSHSISQISWSRLVDMIKYKAEWYDKKCIQISKVFPSSKLCNKCGYKKEDLTLAIREWTCPKCRTKHDRDINASINILNEAIRINNECTTG

SEQ ID NO: 3528 - protein, 389 aa, unidentified
  REGION 1..389: note = Table 20
MPEVLSCKCRINPNWDLKIAFWDAFGASRFVSNNVRQKVRQARIHNKIIDKNCPESKDKKIRINRSFYNDCLRELKHENPFLYEIDSTALQESTQRLQKAYQRYDKRLSGEPKIKTLKNPVQSFTIKNINNSIRLKGNYIRLNKYGFIKLRGLRPVLGRIQTVTILYDKGRWFAILTYRIEIRIDPLPLTGKAVGIDVGLKNYITLSTGEVIAKPDTRDLDDKIKKQRKIISRRFQSSPYGSNYLKAVEKLQQLEHKRNNIIDDFHHKISKKIVTEYDIIVMETLNIKGMLKNHHVSSGIHDAAWYKLKQKIKYKAELYGKTFIEIDQWFASTKTCHKCGHKNNNITLKDRQWNCPKCGTQHQRDHNAAINILNEGLKTLKTEPRGPRG

SEQ ID NO: 3529 - protein, 372 aa, unidentified
  REGION 1..372: note = Table 20
MESCNIMVYCACKHRVYPNQKQERLFNEYLGHSRFIHNNIISEIEYNRRICNLFNVRAPYVNRSYVESIFNYLRVFYPFINDLDINTMQACYNPVLIAYENFFKRGFGHPKFKKKNAASQSVKINNINNRIRVENGKLYWKPFGWINLKGYRSEITGKIKYIILKKQNSQWFIIVQYDTQLPEPLKKTGKEVGIDLGVKTLATLSDCKAKATLKLTETNAKIKKTQKELKRKEYGSREYKKVLKTLHKHINKRNNIKREYYHKISKEIVCEYDVIKMENLNLKEMILDPDYSKGLHEVSLGKLKNMIKYKCELYGKTYIEIPRYYPSSQICHVCGYRNTNLGIEERKWQCPQCGAILDRDLNASINILNYGK

SEQ ID NO: 3530 - protein, 422 aa, unidentified
  REGION 1..422: note = Table 20
MLKKMCDKTFILTDKVEFVPDEEMEKELWFNINASAFVYNKTLEYSIYRENLVKEFAIGNKFKVNRTYTQKIVKTLKKHYPFLEDADSTCLQASTDRLIKAYEGYYDHRTGAPRFKKRKKNHVTSITLRNNFYDTKEGNVGAIRWLSENELRVTKLGKITVKHRRHIKGKIKEATLKYENGRWYVCIVYELDENRHGEFSYGGLYVGIDVGITDFLTFSNGKVIAKPDLKKINGRIQYYQQKLDGKKEGGSNWKKTLKKLHKWIRKKNNVVNDYYHKISYNIVKHCQFIAMETLNIRGMIKGNLSRSIHEIGWGKLIEMIKYKAELYGREFVQIDRWFPSSKKCHVCGEINHDLGREEREWECPHCHAVHQRDVNAAKNILDEGLRATGSMVLCLVDFMLNSQGKSTYYYEWKCFDEKIGMA

SEQ ID NO: 3531 - protein, 409 aa, unidentified
  REGION 1..409: note = Table 20
MLRNKAFVVRLYPNAAQAERINRTLGCARFVYNHFLARRIESYRQDGKGMIYAATDKALTLLKREEGTAWLAEVDKFALQQSLRDLERAYQNFFRTAKKSGKKVGFPKFKKKRTGEAYRTQFTNNNIEIGEGKLKLPKLGWVKTRGQRDMQGKILNVTVRRIHEGHYEASVLCEVEIPYLPAAPKFAAGVDVGIKDFAIVTDGKGEFEHHANPKYYRSSLRRLRKAQKTLSRRKKGSARYGRAKTTLARIHKRVANKRQDFIHKLTTSLVREYEITCTEHLKPDNMRKNRRLALSVSDAGWGEFIRQLEYKATWYGRLVSKISPYFPSSQICHDCGFKNPAVKNLAVREWTCPNCGETHDRDENAALNIRREGLVAAGMSDTQNAHGDCIRPTSVGSGLRSENHATSVV

SEQ ID NO: 3532 - protein, 465 aa, unidentified
  REGION 1..465: note = Table 20
MQKAKSPVGGFPPLRGLFKRAFKVTLIPNHNQEVLINKTIGCARYVYNRFLALKKELYASVGKTLNYNACSQQLTILKKEIEWLKEVDKFALQNSLKNLETAYKNFFTDFKKIKGKKGVGCLEKSLQRGEPAEVAPLGETPSLLASPLGRRPHFSPHRAFRFPKFKKKHGCKQSYKTNLTNGNIQVIENRLKLPKCGWVRFHKSQDISGTIINVTVTRTSSGKYIASILCETEIEKHPQVSRNIGLDLGIKSYLVTSDGEVVDNPKYYRTQKRKLRKAHKELSRSAKGSSNRVKAKIKLAHTYERITNLRDDFLHKLSTRLIKENSIICIEDLRVANMVKNHKLALSISDASWTKFITMLEYKALWHDRLVQKVGTFYPSSQTCNHCGFINPLVKDLKLREWSCPSCSSYNLRDNNAALNILGEGLRLIAAVGIPEALNACGELVSPGLLQAQIVEAGITRLLVV

SEQ ID NO: 3533 - protein, 397 aa, unidentified
  REGION 1..397: note = Table 20
METYYKGFKFRLYPTTEQATQMNKTIGCCRFSFNLALAKQKEKDLLWWITEEMVQNGQLLSNEWKGTRFSTNASLKDSTEFKKTTLWLKEVDSTAIQNSIQNLGDAYQSYYKKEKGKPKFKSKNNEIQSYTSKCNYNNGVGSIRIVDENSIILPKVGKVRFAKSKEIKGRIINATVRRTPAGKYFVSVLAEVKKEPSQISMFQTGIDVGLKEFATLSDGSVIHNPKHFYQLEEKMKKEQKVLSRRVIGSRNWYKQKIKVAKVHEKIANTREDFLQKITTMLVNENQVICIEDIKVKNLLKNGNLAKAISDVSWSKFRRMLTSKCDWYNKTLVVIGSNYASSQICHNCGYKNKSVKNLALREWECPNCKEIHRDHNAAKNILAEGLRILSEMNQPQVA

SEQ ID NO: 3534 - protein, 373 aa, unidentified
  REGION 1..373: note = Table 20
MVLKSFKLRLYPNLEQSSKLNKTLGCTRLVYNYFLDYKINLYKNTGTSINYKDCSKLLTQLKLERPFLKEVDKFSMQNALKGLHSAYDHFFKDGFGFPKFKSKRNPKNSYTTNFTNNNIKIENHHIQLPKVGKVKYKGYKNKNISEYKIVRATISKNNLNQYFCFVTCEVEVQSMPKLATSVGIDFGIKTFATLSNSGSIFNPRTLFVYEHKLKQEQRKLSKKQKGSKNNEKQRLKLAKIHNKVANIREDFLQKETTKIIKENQIINIEKLSVKMMMTSKEYKNIAKELANVSINKAIQMLKYKADWYKRTLVEIGEYYPSSQLCHCCGYQNKELKLSDREWICPSCNTHLDRDYNASINILKEGQRILATRK

SEQ ID NO: 3535 - protein, 375 aa, unidentified
  REGION 1..375: note = Table 20
MEQFIYLRYQYRIYPNITQRKQMSVTADCCRFVHNYYLNMRSLAWRTQHRSMNYNACANDLKYLKLVYPWLKEADSMALQEELKDLQLSFEKFFSHSGGYPKFRSKKESGISYRTRNQNGGIRLSLDKHFINIPKIGMVRIKLSRDIPGEILNATLIRKPSGKYFVSLTLKIESASLIKGNHGMEHGLDLGLRSFYVLDDGTVAPNMKYLYETNGKLIRAQRRLSRMKKGSSNYIKQKRKVARLHEKVCFARHDYLHKESTRLAKMCSLLCIEDLNIKGMIRNHKLARSISDASWSEFTKMLEYKMPLYQGALVKVPRFYASSQTCHICGHRNPKTKDLAIRRWTCTVCGTEHDRDVNAARCLLQKGRTMLPDAA

SEQ ID NO: 3536 - protein, 394 aa, unidentified
  REGION 1..394: note = Table 20
MLKGVRIRIYPNKTQKKLISKTFGCCRLIYNKCLALRKDTYESTKEFLGYKETNAMLTALKKEDDFSFLKEVDSISLQQSLRDLDKAYKNFFRTKAGFPKFKSKHDPLRNYRTQNVNNSICVTLDGKHIKLPKLGYVKAKCSYDLTSAKINNATIEQLPSDKYYCVLNIEVKTPTYTNDGCMIGIDLGIKDFYTDSNGYKCPNHKWIAKSMTKLRKEQRKLSKMIENHIVDYKIIKGYRHPIYDKPLSECRNIQKQRIKVAKIQEHIVNQRNDFLQKESTKLVRENQIIGVEDLNIRGMIRNHKLAKSISDVSWSKFVSMLEYKAPLYDTEIVKVPKFYASSQLCNCCGYQNKETKSLLVREWTCPSCGTYHDRDVNAAINILNKALIIRNKVA

SEQ ID NO: 3537 - protein, 412 aa, unidentified
  REGION 1..412: note = Table 20
MEKGYKFRIYPNAEQVSQIEETFGACRWVWNYFLELRIAAWQANKKGFSNKDLMRHLTDLKKTVAPWLYDVSNPALQQTLRDLDKAYANFFRRCKSGAGKKGFPKWKRKSSGRQSYRVPAENGKKARVVDDKHVKIPKLGIVKCRVSRELEGRILSATIRRVPSGKYYVTFICTDIPEPDMPLGDNVILGIDAGIHDLMVRSDGVHMENNKYLKASEKRLKRAQRSLSRRKKGSKNYQKQRNKVARIHERVVNQRTDAIHKATTDAVRESQAIATENLNVEGMMRNHKIAKSASDASMAEAIRQLEYKCRWYGRDFVKVDRMFPSTQLCGCCGEVVGPKGLRQLYKRDWTCPSCGTHHDRDLNAARNIARKGSELLGYDQETTVGHTGRNACGEDKDLAPSAILDEAGIHRL

SEQ ID NO: 3538 - protein, 380 aa, unidentified
  REGION 1..380: note = Table 20
MGKGFEYRLYPSREQMRLLARFFGCVRWVYNFFLRLCIDTYEKTGKSPSIYECMRMVTELRKAEDTAWLAEADSTALQQSLRDLGKAFGNFYKRRNQGVGFPRFKKKMARKSYRTTKVRIVDDSHVYIPKIGVVKARISRPIQGRIVSATIKQVPSGKYFIVFTCTDVPEAPKAKTGKAVGIDLGIASLVTTSDGQKIGGTEGARKLERKLAKEQRKLSRKKKGSNNRAKQKIRVARAYEKIANKRKDHLHKVTAKIIDENQVICAETLNVDGMLKNHHLAKSIAMQSFATILGFLEYKAREKGKIFVQVDRWFASSKTCNSCGVKADAMPLGIRSWQCKSCGATHDRDINAAKNILTEGMKVLEGTEGHSGAAAITIAA

SEQ ID NO: 3539 - protein, 372 aa, unidentified
  REGION 1..372: note = Table 20
MEKTYRGQKFRLYPTSEQKAEIEKTFGGTRFVWNYFLERTEKALERRGEALSTYECNRILTKMRKEWFLWLDEIGITALQKAIANLFAARRFAKRQQRDPHALFRSKKSPRQDFTTAKSIHVTESYVQIPCIGRVRCRKRPVLPGNPVEVKISKTAAGKYYASVVFVSEQAPRSMPNSVVSGEIGLALSYSGFVVDTAGNQYVRQGAKKENQRLIRKTRTLRRKKPGSIRAQKTWRELVRLRERIYYRNKEFHHKLTKKIADENQVIAIDHPAVANLPDAQEYKRTLQTFSWTDFFVTLRRKAQERGRLFFSVERRIPGLCFCPKCSEAFLMQPPFLPEQRRCLFCGAVYEDSFAAASNALEEARERLRFVR

SEQ ID NO: 3540 - protein, 508 aa, unidentified
  REGION 1..508: note = Table 20
MPNEKKGDEEHGVRLSYKFCIYPTPSQCEAIKANIDASRFVYNHYLRARMDAYERTQQEVRRPKPACDEQGNVQYDQDGKEIWERTEGGKVVFHTIPNPTYDPAAKVMSMFDTSKDLTRLKKELVDEDGKPWLKEADATALIYALRNLDTAYQNFFRGIKKGQDVGFPKFKSRKNPVQTYKSGNVKLAGCDLDDGKAEAAVAEIPSPIPADWDLAGISWNGIVLPKIGKVRARIHRIPEGKFVSCTVERKASGAYYASTNVKERELPAYPAATGEVGITFGASHWAVTSDGQVMDLPERIERLQRRLAIAQRDLARKEPGSQNYLKQKRKVARINERIADVRKAATHNATRELINGYGTIAARQMGSKEMQQHDGAATKDLPRKVKKMLNRKMIDGNFAEFNRQLAYKSAWANRTFVEVPGDTPTAQVCSRCGHEELVLARDLRPAWTCPECGAKHDRKANGAQNVLEAGKDILAKQEQSFVTKAKRSREKKRAAKPKNSEKQNDWQL

SEQ ID NO: 3541 - protein, 479 aa, unidentified
  REGION 1..479: note = Table 20
MGMKAFKYRLYPTKAQEAAFNGLFGAVRFVFNYYHTMRSNLYVKKEDLTMSIPEEYELYDEERSIYRHKEDLTLWYALQNHDLSYNFIKVNEDGSPADFSLPKEEEPPAEFMWIEDNVYAVFTEERDFVCYVERAKDESGSLLWRICQKPQKLDFSQFHLSNHFTQLKKRPSFSWLRNYPDVPLRVAIENLDTAYKNFFDRIKKGIKPYGYPRRKKRNNSFAIKFEKNSRLLDGDKVILPRYGAVKCVLSRPLEGRPTRATISKEPSGEYYISFACTEVDIEKYPSTEKQIGLSFGIKHLATTSDGVTYDNPKYLSKLDKKLRRAARKASRCQKGSNNSKKAYKAKARIEARVRHQREDSMHKLTTQLVKECDTICVSGMNVKQLMQGSKAARAIADASWGELRRQLVYKAGWRGKQVIVVDKEIPVRQICSNCGAVCPSERKNKKEKWVCPHCNTEHTRGVNTAKNILTQGLKSISES

SEQ ID NO: 3542 - protein, 374 aa, unidentified
  REGION 1..374: note = Table 20
MSKAYKAMKLRLYPTETQKEYFLKNIGCCRFVYNHYLDKRKTIYEDTGESYSRFDCSKDLTEFKKENEFLQEVDSTALNWSLLHLDAAFKNFFRDKSVGYPKFKSRYSPNQSFTVSKVKVDRNCVILPKIGKILARGHREFNNATYKAGTITLAPSGKFYISIRVEYETDIPVVEVNEDKVIGLSFKSDSLYIDSNGHSACMPKYYKDLSDKLAREQEKLSRMVPDSNNYKKQKIKVARVHEHIANQRNDFIHKLTAELAETYDLICVEDVSISKMIQNIEYKNARKSILDNGWNGFITTLQYKLEERGKQLIKVKSETPISHICSECGAVIAADTKLKDKWTCSECNTEHVKGKNTAINIKSAGYKQYLEANS

SEQ ID NO: 3543 - protein, 394 aa, unidentified
  REGION 1..394: note = Table 20
MVEKAYRFRWYPNDDQKVLTNKTFGCKRHIYNRYLEKRSSAYKNDGYSLKLRECDKDMTKYKEETAWLKEVDSTALQAAIQDLDQAYQNFFSSQKKGDKKFGYPQPKSKHDNRQSYRSKNNGNTIRLEGECIRIPKLGLIRYAKSKEVQGRILNATISRVPNGKYYISLCCTDVEEEMIEKTGSVNRLAWTAHELRSCSSHVGIDLGLKDFATDSNGEKYENHKHYRENESKMKRAQRRLSRKPKGSSNRNKARIRLATIHETIKNRRMDDLHKLSHKTVKENDIICIEDLNVKGMKRNHKLSKSVSDVGWGEFARQLEYKCKWRGKTLVKIDRFYPSTQLCNECGFKNEALKGKEGLNIREWLCPNCGAMHDRDINAARNILKEGLRLYKESI

SEQ ID NO: 3544 - protein, 396 aa, unidentified
  REGION 1..396: note = Table 20
MERRYNFRIYPNPAQETQIQKNFGCVRFVYNYYLAKRREAYESGRGIIGYNEMCRDMTKLKRTAGYEWLKEADHNSLQRALKQLDLAFQSFFRNVKKKGTAPGFPAFKSKKSPRQSYTSPASTPRPYMDRRTGELRERKSSVELRENAVKLPKLGMVKCRVSKQAEGRILSATVSRTAAGRYFVSLLFTDWESVAFPQAGRAVGIQLGIKKLVTLSNGTEIENPCYRKRSKEKLIRLQRGLSRKTSGSRNYEKARQRLARAYEHIRNQKTDMLHKLTTQLVREYDMLCIRDEPIKRMSKDRRFAEPLFDAGWGELVSGLSYKCGWYGKTLVKIDPLYPSTRRCSVCGYEYRRLSRQKVIMEWICPGCHARHKRAVNAAVNLLKEGTRLIGAGREAS

SEQ ID NO: 3545 - protein, 420 aa, unidentified
  REGION 1..420: note = Table 20
MAANYKFTQNYFSCKILAVATILKTYRLKIYPSTSQQQKFDKSFGACRFVWNYFLSERKAAYLKSGDSMNYHQLCLRLTQLKNGDCQWLCETQATYLQQSLRDLDAAYKAFFAKRSGYPSFKKKYSGEQSFRKPNAWRLSGRRLQIERGLTVYCRGTLPPANAKTGSLTIKRDACGDYWATIICQEERNPSQVSTDPIGLDLGLTHLAITSEGEKFKNIRIAKATSKQLKALQQKLARQNKGSKARVSTKNKIAKLHRRTTNIRTNHLHKVTKMLADKNHAVIVCEDLAVKNMQKNHRLAGAIADASWGEFIRMLSYKQEWRGHQVAKIDRFFPSSKTCSHCSHIIGSLPLSLRQWTCPKCSTHHDRDINAAKMVLKHWQGACQGAEGTDGSRRKAVRVTGSMKRKVSIKRQPFSSHQIV

SEQ ID NO: 3546 - protein, 375 aa, unidentified
  REGION 1..375: note = Table 20
MVIFKTYKVKLYPNKEQEQFFAKSFGCARFVYNYLLSLKTKLHKEEGKNCGFSMMCKEIVSLKKKDEYSWLNDIGSRVPSYAIIDLQRSFEMFFAKKARYPGFRSKKSFNSFTTDRISISGRKLKIPKLKSGIKFRGYSLTSDAPIYATIMMDRCGEYYAAIVFRTESALSRKNNEAIGIDLGLKNFIVTSDSIKVDANSFLKDGLKRLSKLQRGLSRKTKGSKSWNRQRKKVAMAYKNICNRRNDKLHKLSTLLVRKYGTICTEDLSIKGLIMNRKLSRLIADASWGDFERMLEYKAEWNGSTVVKVDRYFPSSKMCGVCGAVYKDLKLSDRMWRCPECGTILDRDENAAKNILTEGIRILSAGNSDITPAERM

SEQ ID NO: 3547 - protein, 370 aa, unidentified
  REGION 1..370: note = Table 20
MKTIHRAYKYRIYPTVEQEVLLAKTFESVRFVWNTILDWRSKEYTQNKTKVNFVSSSRKLMEVKNSTKWLSEVSSVALQQTLRDQDVTFSNFFNKRAKYPNFKSKYSNQSFRLVSSGFIYKDGILKIAKSKQPLKVKWSRKVKGKVSSIIISKDSANRYFVSLLSEETIESKPISTKKVGIGLGLTDFVVTSDGMKYKSLKATAKYAQKLKKLQRRLLKKQHSKSKGDTIPKSKNYIKVQKRVARVYAKIADSRNDFLQKLSTKLINENQVICLEDLNVANLDASWSKFVSMLRYKADWYGRTLSFVSPNFPSSQICSHCGTRDGKKDLSVGKWICPHCGTHHDRDINAAKNILTAGLAGLACGDSITVR

SEQ ID NO: 3548 - protein, 949 aa, unidentified
  REGION 1..949: note = Table 20
MANRAYKYRFYPTSEQAQLLAQTFGCTRFVYNYVLRWRTDAFFQRQEKVGYLEANAALTRLKRSGEFPWLNEVSCVPLQQCLRHQQSAFKNFFSGRTKYPAYKSKKHRQSAEFTRSAFSYRDGKLYLAKSRTPLDIRWSRPLPSEPSTVTVSRDSAGRYYVSCLCEFEFEALPVTPKMIGIDLGLKDLFVTSDGERIGNPRHTAKYAARLAKAQRRLSKKKLGSKNRSKARLKVARIHAKISDCRMDRLHKLSRRLINENQVVCVESLAVKNMIRNPRLSKSIADVGWGEFARQLEYKGEWALPRGHSQYRIARDLTGWVDQHMGWVDRSRYLNEDGTRMTDDQLRDFLTHAGTTLATGGVNKIEPGRVGGSGMRANRGSESRQIHYRDADAYMAAQEAYGDKNIMDLMFGHIDQISRDIALVETLGPNPNHAFKYFSESAFQHEAVSSPRDISRRLNKQRKRLDYLYTEVAGTREPPVSARIANWFDTYRGINVASRLGSAVITGLSDQGPIALTAKMNGMPVMRVFSNEAKMLNPLNDQHRRTASRAGLGIAQLMGSMARWGADGLGHDAEVAGRASGYSQTAATTLLRASGMNAIDAANRRAFGATMMDAVGYLTRNHESMSSLEAGDRARLRNMGVTDTDFSVWRLAETEDWRGIGDTILTAGSIYRITDEALSDISARTRTSPQRLRDQAATKLLGSVLDETNMAIPAPGARERAFMHGRNARGTWGGELARSFWQFKSYSVSMVMKHWKRAFAQQTGWGKAGYMAAIFASTTVLGAISLQFNEIASGRDPKNMLDADDTTGVPGLRFALAAMLKGGALSIYGDFLFSDTTRYGTSPLAAIGGPVAGDIEALFKIRGTAQDLKGDQLGGNLVKFAKSHIPGANLWYTKAATDHMIFHQLQEYFSPGYLRRMEQRARKEFGQSYWWEPGDYTPRRAPALESAFGP

SEQ ID NO: 3549 - protein, 338 aa, unidentified
  REGION 1..338: note = Table 20
EVGNEWLLEASSIPLQQSLRHLQSAYDNFFKGLSKYPTFKSKKDKHQSIEYTINGFSFRKRGKHTGRIFIAKSKEPLNIKWSRELPSDPTSLTIVRNSAGQWFVSFVIEEDQVFGPIPVKVVGIDLGVKTLATISDGTIIDNPKYQKKYQGKLTKAQQTLSKKKLGSKNRDKAKLRVAKIHTKNANCRQDNISKFTTKLSNENQVIVIEDLHVRDMLTTKKSNSNLKRGISDASFRMIRSQLEYKTLERGTDLVVINQYFPSSQLCSSCGARKRNLTLSDRIYICNECGLEIDRDLNAAKNILAAGLADRLNDCGDSRRPEGALPLPESVYETVSLQA

SEQ ID NO: 3550 - protein, 386 aa, unidentified
  REGION 1..386: note = Table 20
MAHRCYKFRIFPNKEQEIVLKKTIGCCRYVYNWGLRLRSDAYKKDKTKIGFFETSEQLTVLKSELKWLKEVPAVPLQQSLKFLDAAFVNLFKKQALYPKFKLKKSDGSARFVGVSFRLKDNYFYLSRINSPIKVAWSRKLLTKPSSCNISKSPSGQWFVNFVCEEEVKKLSPSNERIGIDLGIETFATLSDGRKFKQPDSIRKMRRKLARAQRSHSRKKLGSENREKTRIKVARVHQKIVNIRQDFLHKLSTSIVRENQVIAIEDLKVSDIIQKRSRKMSRLIGEQGWQSFRKMLDYKTSWYGRELIVIDQFSPSSQICNSCGKTNKVSLDKRSVKCECGVTYDRDINAAKNILAVGTTVTACGAGIRHLRVPPVAKQESLLEMAR

SEQ ID NO: 3551 - protein, 403 aa, unidentified
  REGION 1..403: note = Table 20
MAQKKGFKYRFYPTEDQEAVLAKVFGHTRYVWNWALELRTDAYYEEGESLSYTDTAKRLTGLKKEKTWLREVSSVALQQKLRDLDQAFQNFFDGRCGYPNFKAKHDKQAARFASNAFTLHGEKLSVAKVPGSLNVRWSRDLPEEAKPTSVTLTKDPAGRYFVSITCTLPDPEPRPVVTDKEGDHKSVGIDLGVADVVVTSDGWKSGNPKYLEDDLYRLQKAQRRLSRKEKGSENWKKQKQRVAKIHAEIQDKREDFLHKLSRRVVDENQVIALESLSVKGMQQNRSLARPISDTGWSTLVRMIEYKAKEAGRTVVKIDRWFPSTKRCSECGYVTESKPLSVRSWDCPRCEATHDRDINAAENIRTAGLAGASQKANDSGGHSKTRDAFRIERSRPNAHGPVNE

SEQ ID NO: 3552 - protein, 391 aa, unidentified
  REGION 1..391: note = Table 20
MKERWTFRLYPTPEQEQHLARTFGCVRYVWNWALRLRTDGFRAGQRIGYPETDRRMTALKQQPETVWLNEVSSVCLQQSLRDLQVAFSNFFDKRAAYPAFKRKEARQSANYASQGFTFDSATRTLKLAKIGEVRVRWTRAKIPAPSSVRVIRAASGKYFVSLVVEAAPVELPKTGQDIGIDFGVARLATLSNGERISNPKHGAKWQKRLAFYQKQLARKTKGSKRRARAKRRVAKVYERIANSRLDTLHKLSTDLVQRFDAIYVEDLNLRGMVKNHHLARAVSDASISTAIRLLEEKAERAGKTVVKIDRWYPSSKTCSHCGHVQGKMPLSVREWTCPECGTHHDRDVNAARNILAVGHTVTAHGGTVRRPRAKAPGRTSPRSANGADSHV

SEQ ID NO: 3553 - protein, 351 aa, unidentified
  REGION 1..351: note = Table 20
MRLRYRYRLHPSAGQEAALAKAFGCCRVVFNDVIALRRAAFEAGNPWVGDAEVSRLVVTEAKRREDRAWLAEVSSVALQQAVRDANRAYRGYFDAMTGKRARGSVGMPRFKSRRDRRQAVRFTRNSRFRITSDRRLRLPGIGEVKVVWSRDLPGEPSSVTVVKDAAGRYFASFVCEVEPSPLGGGGALGLDLGLRSFLAGSDGRRVAAPRCYRGKERKLARAQRSLARKRPGSANRKKARRAVAAVHAEVADARSDFLHKPSTRTCSACWKVGDRKPLQVRSWACNHCGVLHDRDVNAAKVILAAGLAERENACGAVEDLLAHLRGRASAPSQARQPAGDWTEAGITTAAR

SEQ ID NO: 3554 - protein, 974 aa, unidentified
  REGION 1..974: note = Table 20
MQLRYQFRLYPTPGQQTALARAFGCARVVYNDALAAREQARRDGLPYLADAQLSRALTDAKKSPDRAWLAEVSSVVLQQALADLNSAYRNFFASITGTRKGPRLGSPRYRSRHDHRQSIRFTKNARFQITDGSKLRLPKIGDVEVRWSRGLPSEPSSVTVINDASGRYFASFVVVLDDEPMPELDTDVGLDLGLATFAVLSNGKVVDSPKFFRRAERRLRKAQQNLSRKQKGSKNRAKARITVARAHAKIRDARLDFAHKQSTTIIRENQAVYVENLCVKGLARTRLAKSVHDAGWSMFTRLLEEKATRYGRHFLKVDRWFPSSQLCSACGRIDGLKPLSVRSWTCLCGAEHDRDLNAARNILAAGRAERLNACGAQVRPERVPAQRGEAGTHRERQAALVGIPGLRPRRASKADGVQFLQNTLRAAGRDGAGPRRELVEQGVPCPFAPLPHRGERPHPLQLHGVVAVGAQSFRDLDSEPADQALQLGDVVGGQSHLGGPQPPEQAQFLETVHVGQQPFGRHQDVARPRQRMRGEDPLERHERRVGLQLIGPLPELDVDHLTQFVEPAAFHQFGRQRRRVLGAQPDQGDGHPDPEEPEAVCQLGPHPRVHGQRTVLPREPVGRQHRQVQIVHRDLGEVLERGELGLSHRAGTERQQTRDGDDGLAQPGPFEFAREPGRHLLRRHHGVQPARPHLVGARHDTDHAEWPRLVAHVVADLAEELDVGRVEGAQQVDHGVGAGRLVVRGQHLEGAGRDVPRQRGRAGGVDDGRVRERGRRPLHIEAVHLIGGEVAQVEREVSVPAQHRHVGGTLCPGARLGLVPRRHGGRRPAAVPGDDAGALGRVGGRDVLPHQGIEQRGLARLQRAGQRHPQRLFQSPGASAQLIPDVGTARVQPASGRDQRAGFVQRRGAHAVTAPASPATSCAACCFSADATCRSFSSCAMRRVRSVDSRFAASCAARSDSLIERSACSAMAVK

SEQ ID NO: 3555 - protein, 534 aa, unidentified
  REGION 1..534: note = Table 20
MPVGEHLMPELRHENQVGMHREIDLGLTHFAVLSDGTKVAAPTFLRRAARKLKRLQQALSRERRGSQNRKKAVVRVARAHARVADTRRDWQHKLSTTITRENQAVYVEDLAVAGLGRTRLAKSVHDAGWASFTAMLEYKAAKYGRAFGRVDRFFPSTRMCSQCGRINDTMALNVRSWNCPCGTTHDRDVNAAINVLAAGQAESLNDRGAHVRPGLAPAARREAVTHPDTACSTRSVEGISVLQDGEDVNPSMPVELSRLRHHAEGGPPTGSNLALEKFGGPVKPAADPTRHQAESTEDRQRQGCRLRRSRQPGGTVLVRSWLADAGLVVLSGAAAAVYGMLPTSHGAAAAVEAEPAAAVVPMAVARPVAAVAPVAASPSKPSVEPVLSGKRRVTIVRVGAFESGLSLLDGGRLTEVDDDRGRQVFVPTPLGSGEFLIKAYHGGGTGQPICWQVRNPGDTQPLFVRGAACRADDQAQRFVIAPAPAGGAREYLISNRWAYLRDSARSGLILEELGDAPSVSSFRFNDTGPAPRQK

SEQ ID NO: 3556 - protein, 525 aa, unidentified
  REGION 1..525: note = Table 20
MGAGRGISRRVAAARATERDQRPVDVEKDDRAVSGVGHRRHCTNAPSCYRGTCPSRSRTVGGKVAQMAAVGRGADELTPSAPDRAPNVVAPMCQPMWVQLRYNYRLYPSPSQQQALARAFGCARVVFNDGLRARQAARESGEGYISDGALSKQIITTAKQTPERAWLATVSSVVLQQALADLNVAYRNFFASLNGKRKGAKVAPPRFRSRKDRRQAVRFTRNSRFQILPNGRLRLPKIGDVPVRWSRNLPAEPTSVTVVRDAAGRYFGSFVVQDSHDRTLPPIDGQVGIDLGLTHFAVLSDGTKIAAPKFLRRSARKLRRLQQSLSRKQKGSNKRRKAVMKVARAHARVADSRRDWQQKLSTTIIRDNQAVYVEDLCVAGLGRTRLAKAVHDAGWASFTGMLQYKAARYGRTFARVDRWFPSTRMCSTCGRVNDKLALSVRVWDCICGSHHDRDINAAINIKAAGRADFNDRGAQVSPALMPAPRREAVIHPDAAFTTSSVEGISVGLGGENVNGSTTTGRAHQP

SEQ ID NO: 3557 - protein, 439 aa, unidentified
  REGION 1..439: note = Table 20
MSSYRRYNYRAYPTGEQRRALSRLYGACRFVYNWVIDQRKLMFERRGKPQSYNQLSHMLTLLKRDPDHRWLTEVSSIPLQQAVRHADTAYRNFHRQYKAGKTRLVENKKTGRKHRTGLPHYKSRRDGEQSAEFTRSAGFKVEHADGCRWMFLTLPKVGHVRLRWTRDLPSKPSSVTVMLHADGSYEASLTVLVEKDATPPEPIHEACGIDMGLESLMSVVYDDGTREKLPHPRTLKHKARKLRKLDKQLARQQKGSNNHAKTRLRKAKVYKSIQNQRRDIAYKLASKVAGENQVVTMETLNVKGLARTRMAKSLLDANWARIIERIRQLCLQYGRTFRQVDRWYPSSQICSQCGRRDGRKPLDVREWECPQCGIRLDRDYNAALNILDAAGLAESLNARGGDVRRRLAQAGRNVDAREVGTRRTTSLHQGSLWRRSPLP

SEQ ID NO: 3558 - protein, 385 aa, unidentified
  REGION 1..385: note = Table 20
MQRNELARLFGCVRVTWNVSLAWQYSERRAGLGLQGYGQLSKHLTQMKRDGSYMWLNDVSCVPTQQTLRHLGCAWDMHFKSMAPDWEGPYVEEPRFKKRGKRQTAEFTRSAHWRIRHEPDGRYGYLRLPGVTGELRFRWSRDLPSEPSGLTISLERSGEYMVSFNVMRNEPDSWPEPIHEWCGIDLGLISLAVIASQDKGGATHMENIPNPHVLYEHAERLAVLQRKLSRLSKGSNRYEEQRKRVAKEHAIIKNIRRDCLHKLALKIVAENRHIALETLYPARLAKTRLGKSVLDTGWRTLVSLIEAYAARMNRQVVRIAWNEPSSQICHACGVRTGRKPLHVREWECPDCHVKHDRDANAAWNILQMAYGISHAQPHTDCENMR

SEQ ID NO: 3559 - protein, 421 aa, unidentified
  REGION 1..421: note = Table 20
MRKRYEYRIYPDGTQRHALARLFGCVRFIHNWAVGRRRDMYRRGGVYITDRQMNDDLILLKNDPSYLWLKDVSSVPLIQEIRIINKAYTDYFKSLKGLRQGPKLGVPRFKAKRGRQAAQFTTKARFHVWHDPNRRDGWLRLPKIGNVRVRWTRDLPSEPTSVTVYLEPDGTYHASFVVTAPDTHVERAVPKPDALMCGIDLGLNDIVTLVDTNGNRWKTGNPRFLREAHHRIGRLQHELARKTKGSNRYEQARVRLAKAQAHLRRIRLAWLDVLAEKITDENQAVALESLNIRGLAKSRVGKSVLDAGWGILLRLIHEKAERKNRTVIHIGRWEPTSQVCSHCGKRTGKKPLDVRTWECPYCRTPLDRDYNAAVNILQVAAGPAETLNGRGGEVRQTINDPRVGSAALSRETTTLSPRSFI

SEQ ID NO: 3560 - protein, 412 aa, unidentified
  REGION 1..412: note = Table 20
MNTLTRRYRFRLYPTRGQERLLRRVFGCVRLVHNTMVEIRESDFQQNLPFRKYRELDRILTGLKRDPDYAFLNEVSSVTLQQEVRHVEKAYVNYFKALHDPELFYGKPGYASKHGTQSAEFSTRGFRRVEQMENARWGFVTIAKVGRLRFRSSRMLPSIPSSATIIREPDGRYYVSFVVKTTMESYRPNGRTVTVDAGCRYTASLVNNLGKRSRIDNPRPYRMLERKLARLQSEQSKHEKGSHNYEKLQIRINRLHARIRHIRLDHLMQSAVRIVRDNQTIILETLDIKDMIHKGPAQKALSDSAMRMMQDCIMIQAEKHGRKVIKVPKEYPSTGRCSQCGHLAKVPLSVTVWECAQCHSILDRDWNACVNLFDAAGLAESINARKAALWAGREPTETGAYDTAPVVGIPVL

SEQ ID NO: 3561 - protein, 413 aa, unidentified
  REGION 1..413: note = Table 20
MEQVVRYKYRVYPTREQDQAFTRLFGCCRVVWNDTVRLFQDRFDPVNRDMPSASEFQRIVLTQAKQTPEREWLKNVANVPLTQTLRDSLRACWNGVRKDRKQRFARYRSRKRNPVNSALFTRNGFHVTEHGTFIAKIGVVRTKWSRPLPSQPSSCTVTHEPNGRWYASFMVKRNTTLLPHCDTNAALDLGFNDLASVITTDGERHRIRNPRNYTHTERWIQHVQKKLSRQQKGSHRYEKTRQHLARLHAKSRDRLNDYQNKQVLRLIRDTQAIGIEHLNIHGMMKRHGRSVRSTALSGFVAKLEHKAEQYGRSVVRIGRFEPSTRLCALCKHHVDDGIPEQVRVWQCARCGATLDRDWNAAVNILDAAGLAESLNAHGDHVRRELAAADSRNGRGSANPTDEANGSGLGITVL

SEQ ID NO: 3562 - protein, 444 aa, unidentified
  REGION 1..444: note = Table 20
MRDRSAAGECAVDESADHGGEGFGVLDGEGVVVAEHQRYSYRAYPTAAQTLMLAKTFGCARVVFNDFVAHCRDAYETRGFVPDLDEVKSLVTAQAKHTPERHWLSEVSAVALQESARDAQAGYRAFFASVARTRRGPRVNPPRFKQKSGRQVATFTRSAFSLRADGCSRWGFVRLAKIGEVRFRLSRSLPSDPSTVKVIREPSGQYRVSFVVEVCAATRSEVAAAAGVDLGLTHLAIVVRSTGERYRVTNNKYLRTAERELVGAQRRLSAKTKGGRNQDKTRRDVARLHEKVARSRLDQLHKVSRRLIDENQVIAVENLDIAALGKTRLAKSITDAGWGILLRLLASKAAEAGREIVIIDRWFPSTQMCSQCAAVDGPKPLRIRTWTCRCGATLDRDYNAAVNVMLAAGLAERLNAHGGDVRRVLALAGPDEVGTRLADSRRSA

SEQ ID NO: 3563 - protein, 402 aa, unidentified
  REGION 1..402: note = Table 20
MLAKSLGCARAVFNDFVAERGRLYQAGFHREVSFAETSRRVLIEAKAPGGARPYLAEVSSAMLQQSVRDAEAGYRNFFASLSGTRKGPRIGRPRLKSKHQHTHRMRFARNAGFKVEDQSHQGHGFLTLPKIGRLPLVLSRPLPSAPSSVTVTAHADGTYEVSFVVEVEPRKALEPAHAAAGVDVGITSLAAVAYEDGTSHKIVNPRHLKARERKLARAQRKLSRCQKGSKNRQKTRTQVAKQHRKVRQARLDHHHKQARALVDNTHAIGLEELNVAGMIRNHRLAKALSDTGMSQFLRLIREKAEETGRTVVTVDQWFPSSQLCSECGCSGGKKGLGIRQWSCSCCGAVLDRDINAAVNVMIAAGLAEIENACGGSVRPAPVLAEPMKQEPAEQTPTLLGAV

SEQ ID NO: 3564 - protein, 437 aa, unidentified
  REGION 1..437: note = Table 20
MLSSSDMTPSIACGIVNTMKRRLSQRAHLNGEQRAHAAKLFGCARVVYNDFIAGCENTRKTGVNPDWDVIAKQVTTDAKKTIERQWLSEVSSVALQQSVRNAQRAYRNFFASLNGSRRGPKMGRPKFKKRKAKQSVTFTKAARFTVWVDGCSRWGFVRIPGLGEVKFRVTRELYWSTVSTVTLSGNPDGTYTVSFVYEDSRTFTPSPENTVCGVDLGLKSLAAVVANDGSRYLVDNPKPLRAAQRKLARLQKAHARSQEGSKNREKARIKVARLHTKVANTRKDHLDKFSRKLARENQTVGMETLSVSGMGKTRLAKSVYDTGMGMLNSMVEYKAAEHGGVVVRVGRWEPTTQVCSQCKHRGGRLPLSVRQWTCSQCGAHLDRDFNAAVNIMNAVGHTESLNDCGGDVRLRLAEAVTCESGTHRNRRFPAVVGISTL

SEQ ID NO: 3565 - protein, 425 aa, unidentified
  REGION 1..425: note = Table 20
MSNVKRRQTFRAYPTGQQAKELSRLFGCTRVVRNHFITIMQQAHRQGDTLSLSTAEKVATTTLKRTEGYGFLNEVSAVALQQAARNTTRSFREFFRACSGSRSRVGFPRYASKRNRQTASFTKAANFRIRHPQGCRWGFIRLPKITGELKFRACRDLDWSSVGTVTVTRSPSGVYEVSVTHDVEPVILPETVTACGVDLGLTSLAAVVSSSGHRHLVDNPRFYRSAKRKLASVQRSLSRKTKGSANRKKAAARVAKIGRKVACQRKDHLDKLSRHLVNDNQVIGIEDLSVAALSRCLRLSTSVYDAGWAMFRDMLTYKAADAGRTLVVVDRFYPSSQTCSVCGRRDGKKSLNVRSWVCAGCHSPLDRDFNAATNLMLYASEAAGHADSLNACGGSVRLRLAGAVSREAGTHRSGRETGAVGIPAL

SEQ ID NO: 3566 - protein, 233 aa, unidentified
  REGION 1..233: note = Table 20
MPAPIAPTHPDRVAGIDLGLTDLATIAYSDGTREKIAAPKHYRAAERKLARAQKKLSRAQRGSKNREKLRVEVARIHARTANLRRDHARQLISRLIRENQTISLETLRVSAMVRGRYGKSITDAGWSQFVTELEAKAATHGRTVVRADRFFPSTRLCAICNTKSGPSSTDVRQWTCTCGIHLDRDYNAATNLLVLALAPGKVERLNACGRDIRLRLAGAVSNEAGTRRNEVTS

SEQ ID NO: 3567 - protein, 397 aa, unidentified
  REGION 1..397: note = Table 20
MRKKSHGGSVSLSDGAFRIAGGWQNTGRTGGRLHLGKHIGTVGVRWSRPLPSDPTTATVVLTPDGRWWVSFVVREALALTKPQNPGRVAGVDLGLTHFATIAYSDGRFEKIDNPRFLLKQERKLAHMQRDLARMQGPTRGRKASKRWDKQRRRVARLHTHIANQREHFARREAAQLIRENQGIVVETLNIAGLGQSKVGKSVYDTAWGIFLRALQEGSVKRGRDLIVLPRFFPGSRKCSACGTVDGPKPLRVRSWTCPECGATHDRDVNAAVNHLEYAYQVAALAAEDLTALDLAAGLAERLNARGWGVGQHMAPPRDTTPCEASNGRTGWERKLLARRRRSRRSALRRKHVRNRGARTVTSQAAQGVAGDAGGIARGFQRNRPVKASELPRKSRAE

SEQ ID NO: 3568 - protein, 375 aa, unidentified
  REGION 1..375: note = Table 20
MKRKAARQTARFDEYSHTIRGGWQNSLKGGGRLYLVKVGLVRVRWHRPLPSAPSAVTVTRETDGRWWATFTVQVPVEPARPPVHEGRAAGVDIGTEDIALVYSDKTRAKVMTLRAERDDTHEKRTGPQSYRQAEKRLAALDQELSRKTRGSNNRKRTQRKRALLHTRLKNLRTDFARQMAAQLTSENQVVVVETLGVREMVQDAHAKSVLDTAFATITREVALAAEKRGTTLIEAPRYFAGTRTCSHCGTKGPKRPTRVRDWRCASCGAVLDRDYNASVNHLMLAAGSAESLNGWTPEDRRQLASLPGEGNHVVLERPRAVRRGSVCEDPVLADVDSVREHSPRTTQVAARGLAPRPQGIPTGEDLRDLQKDAAR

SEQ ID NO: 3569 - protein, 561 aa, unidentified
  REGION 1..561: note = Table 20
MTLDLPDGYEHGTTRAYRHCRPACVACRAANTAAAAARPAAKLADGMPAETHGKPSGYTFWNCRCKRCKRAYRASNAVRTRATPPAPDLVAMPAEDHGTTRGYNRWRCKCGPCKAAGTRQRAERKEAKRAAYHGPVSIKRYRYRINPEPAVEEGLRRTLGSCRFVYNSYIALARSAHAVGAPHPDGYAAAKLLVTEARKAEATAWLTDVPSAVLRSAVSDAATAYENYFSSCRGARKGARIGAPKFRKRGHRQAARFPENAFSIRGGWQDTGPGGGRLRLSKIGDIRVNWHRPLPGYPSAATIIYEPDGTWWVSFIVRVPVDPPKTPTRQPRTAGIDLGTEDFAALVYDDGTREKVAAPKRYQKAEDSLRRADNNLSRKKPGSKNYEKARRARARAHRRVANLREDHARQLASKLTRENQAVCVETLNITGMVSSGHKKRNKSIHDAGWRQFLRFLEEACDRKGVTLVKAPRYLPSTQVCSICGVNSGPKPLEIRDWVCPGCGTHLDRDYNAAVNILVAGPATCGRDMSLRLAAAVPDEAESHRSEALVKASRRRKRVRRP

SEQ ID NO: 3570 - protein, 411 aa, unidentified
  REGION 1..411: note = Table 20
MLRYRYRVYPDTVQQAAIARLFGCVRVAFNDALALRKTHYAETCTHLSSRVVSAALTASKRTPEREWLNEVSCIPLQQAVRDLDTAYKNFFSSVTGKGSRVSPPRFRKKSSSGSARFTTSARYSLRQVNTGKALLTLPKIGELHLAYFRVVPAAPTSVTLIREADGRYYASFVVDPDPSTMIASTSTDEAERTAGLDLGLTDFAAITYSDGTRAKFPAPRFYRKAQRKLAWAQRELSRRVKGSRNRAKSRVKVARVHAKIRDDRQDFTRKIAVPLARENQTVAVETLNIKGLARIRLAKSIHDAGWGAFIHDLTHAGEKYGCAIIGISQWEPTSQTCSVWGIKTGRKAPDSRAWTCPECGARLDRDYNAALNFMLAAGLVESLNDCGGNIRLRLAEAILEETVTTQLMDAV

SEQ ID NO: 3571 - protein, 464 aa, unidentified
  REGION 1..464: note = Table 20
MGPVMKRRYVFRAYPTTRQQRGLRRLFGCCRYIYNSVIADRQMTFETRLHAVEESRPTQGNPDRTVRSFDANRQAALITYERTRKPWLNDVSSVALIQSMRDAEQAFSNFFASVSGNRKRPRVGFPRFKSRFTGKQSARFTSNGFRVDGDRVFIAKIGWVRFVRSRALPSTPSSVTIIHKPDQTFEVSFVVEVAPVDLAPAIERHAGIDAGLDTFAAVVYSDGTREKVDNPRFFRRQHRRLRKAQRDLSRKQGPDRRTGKKPSKGWRTQQARIARLHSGVVHTRTDFARKLARRLASENTTIAIESLNIRGLARSGGHDAQGRGLRRSIHDAAWGAFFANLANVAGSRLLAVDPAHTSQTCGVCGVVDGPKPLSVRKWECQACGAVLDRDWNAALNVMIAAGQAEISNAGGGDFRLQLAEAVAKEAGTRWSAGEVAASTPATLSGKPKNPAASAARRKSTGGPA

SEQ ID NO: 3572 - protein, 395 aa, unidentified
  REGION 1..395: note = Table 20
MSKQGYKTRIYPTSGQEQDLARIFGCVRFIFNQYTAYRDYEYENQVQQRKTYSQLRSILTVSNKKTAFPWLTQAPAAALQESCTQAKDAYAAMVKKRAAGKKAKKPRRTRKGVQSFRLPGANSFKIKAYDAKRGKFKLYIPKVGWVKGKAGRNVETATSLTISKDSTDKYWASFILETQPRAAAPAQAASIDLGLTHLAAITTTSGYRHKIDTPQFYRKNQRKLTRAQRKFARTKKGSNNRAKAATNVAKVHQKTRNQRNDHLHKLTSTITRENQTVAVETLNIAGLSRTRLAKSINNAAWATLISMLDYKLANAGGRLIKIDRFAPTTQACSVCGAPGGKKALNIRTWVCTHCNTHLDRDYNAAVNIMLAAGLAESLNACGEGVRRQLAGAVLV

SEQ ID NO: 3573 - protein, 413 aa, unidentified
  REGION 1..413: note = Table 20
MSPSARRICPCWGGTATVPTRARGRWSLWPVPSAAPGGSTTWDRFQGKTLPGDLAELPGQRAVQTSPQAQEATGNGLALRSLLDHPPAVTDRSRKGIPELLRRDHGPETGRLTQVHKEGRTPVLPDRGRGLVQSTKDQQTVGRGETTQDRRIEIPPLACACGQSHIGHRDPRIGQCVPRFLCRECSGASRAPSEREAGVDLGLHDFAAVVYSDGTREKIQKPRHMGRVQARLRQAQKDLSRKMKGSNNRKKAKQCVARPHAKVKRQRMDFLHKQSTQLVNENQVTVTEGFTVRGLARSGARGRRGRGMRRSIHDAGGGIFLSLLFRRATERGREHITTDKFCPSTRRCCLCGTVGTKKELSVRTWTCACSPEVVLDRDYNAAVNELVAGGHAAYGKELRRVLATATDVRSLEK

SEQ ID NO: 3574 - protein, 180 aa, unidentified
  REGION 1..180: note = Table 20
MRRVSSVFTRWFRWKDGRLIDAGLASLLALSTGEKVVNPRFERADRKRLARAQRALARKEKGQDRKNRAKAALKVARVHARITDRRRDHLHKLTARLVRENLCSTCGALAERMPLNVRSWTCRCGTVHDRDVNAARNILAAGLAVTACGDGVRPQRESSRTRRPTVKQETPRATTGIPVL

SEQ ID NO: 3575 - protein, 322 aa, unidentified
  REGION 1..322: note = Table 20
MRHGENAGEAGVQVPLLSERAQRQELLRTFGCVRKLYNLALDARTRAWFTEQRRVNYTETSAMLTAWKKTDEWSRPLPEGAEPSTVTVSRDAADRWFVSLLVETSVEQHDLSDTAVGVDAGISSLATLSTGGKITNPKHENRDRTRLAKARRELARKQKGSNNRDKARRKVARGHARITDRRRDHLHKVTTRLVRENQTVVIEDLQVRNMLRNGTLNVRTWTCSGCNTAHDRDVNAAKNIPAAGLAVSACGAGVRPQRETSRTGSRLRSRNIPARAGREFPPFTAGSSQDPSFPGLRMRAGSNALLIRRSSATCSGPMRSAR

SEQ ID NO: 3576 - protein, 379 aa, unidentified
  REGION 1..379: note = Table 20
MSIVCAHQYRIYPTKEQADLLTRTFGCARLVYNMALEHWRDAHKAEQRLIPFRELSAMLPTWKGKLPFLKEVSSVPLQQAIRHLNEAIGNFFQKRGKYPSFKSKSGHQSATFMRNAFKIADGDLTLAKMPHPLRVVWSRPLLGHPSTVTITKDPAGRWFASLQFECAHKVVPAPSNAAIGVDVGLIDIAVTSCGKRYKAPRYLSQRLHSLKRAQRALARKKNGSRNREKAKQRVARLHSKVADQRRDFTHKLSTNLIRDNQAIYVEDLDVGPLGRTFLARAIYDAGWGMLRRQLKYKASWYGRSLIKVPKHYPSTRKCSNCGIIGQKKPLPVRTWTCHGCGAEHDRDMNAAINILAAGHAVSACGEVLSPVPEMDRQPS

SEQ ID NO: 3577 - protein, 386 aa, unidentified
  REGION 1..386: note = Table 20
MVDAGFRYRFYPSPEQENDLARTFGCVRVVYNLALDARKNHYAETGKGLSYGKTSALLTTWKKTEAYRWLREVSSVPLQQTLRHLNAAYQRFFEKKAGYPSYKSRHDKQSATFVKSGFRLTGDWRRPEVHLPKMAEPLSIRWSRDLPSEPTSFVITKDKAGRYFISFRVRLCPQELPPRTKAVGLDLGLAHAVITSDGQKIDNPRYYRRQLDRLRHEQRSLSRKQKGSRNRRKQQRKVARLHGRIADMRRDWSHKLTTDLVRRYDVICIETLNVKGLLRNHCLAQSIADVAWAEIKRQLRYKAEWYGTRLVEISQWEPTSKTCSACGAKRPSLPLSVRAWVCDGCGVVHDRDVNASLNVLAAGLAVVASGLNGSPVTTLSVAGVSG

SEQ ID NO: 3578 - protein, 448 aa, unidentified
  REGION 1..448: note = Table 20
MFVQAGYRYRVYPTDEQAMMLLNQMGICRWVWNEAHALRQRVWHTEGRSVGYAQLCRHLTVARSESEWLRAGSVDCQQQAIRELCAAYGRTFTARMTTGRKVPLPGPRRKRGSGWKTVRYTRNGYRLDPDGGLLLAGVKGGIIVRWSRGLPSHPTGVSVTLDAAGRWHASLCVEVKETPLSPTGRTVGVDLGVKAALALSDGAVIENPRHLRRRERALARSQRTLARACKGSKNRAKAKMKVARCHAQVRDARRDWQHKATTALVRENDVICVEDLNVKGMSATAKGTIEQPGRNVAQKAGLNRAVLDVGFGTIRSQLVYKASLYGRDLRVVDRWLPSSKTCSGCGHARTKLALSERTYTCDRCGLVLHRDINAALNILAAGLAESQNACGEHVRPRPPRRPGQRSMKQETRRATAGNPFSKEGEEVNSGHSKRSASIGRIAAARQAG

SEQ ID NO: 3579 - protein, 486 aa, unidentified
  REGION 1..486: note = Table 20
MFVERTGAPYEYRTGGGVVVKATEEDGRNRVTGAEAKRVKREALGVPDRVKHQQRVAVPMQRRTPEADTRQRVYRYRCYPTPTQAEQLVKTFGACRWTYNEGLALRDRAWREHRVSLGFAESCRALTGWRNAEGTRWLQDVSSTVLQQALRHLDAAFGQFLKGTTKHPRRKKKNRSRDSATYVRTGFRWAEDPERPGTGLISLAKQSGPLHIRWSRPLPARTRPVKLTVSRDRAGRFFVSVLVEERIEPLPPVVLRDGGAPTAVGLDLGLAALVTLDDGEKVDHPRLLKKYGAKLAQLQRSLHRKQKGSKNREKARQEIARLYALIGDVRRDALDQLTTRLVRENQVLVVEDLAIASLVRSPKGKGRRRKAGLNRAILDASWGALLKQLLYKCAWYGRTLIIVDRFFPSTRRCSACGVTGPKLDLAVRSWSCGGCGAVHDRDVNAARNLREEGMRLYEVVASALPLGRTMPSMIRASEVPDVVLTA

SEQ ID NO: 3580 - protein, 194 aa, unidentified
  REGION 1..194: note = Table 20
MSRDRAGRFFVSVLVEERIEPLPPVFLRDGGAPKAVGLDLGLTALVTLDDGEKVDHPRLLKKYGVKLADLQRILHRKERGSRNRDKARQEIELLRQLRYKCAWYGRTLVIVDRFFPSTRRCSACGVTGPKLDLSVRGWSCDGCGAVHDRDVNAARNLREEGLRLYALVASALPAGRVMPLVIKASEMPDVVLTA

SEQ ID NO: 3581 - protein, 427 aa, unidentified
  REGION 1..427: note = Table 20
MLRGFRVRLYPTATQEQFLSRTLGCVRVVWNQVLNWRKEQYAQHRTFGSYRDASGHLTELKRRPDFEFLREVSSVPLQQALRHQQRAFENFFAKRANFPRFKARANRGSATFAKTAFRIRDGRLHLAKLAEPVRWVWSFDVPVEELDVSSVTVTREPDGSWWASLCAEMTDSQEPEPPEPTGKAVGVDLGVHTFGTLSDEAEPLEAPDLRRKEANRKRYQRRMARKKPGSANRNKERKKAARAYRKERQAREDMLQKTTTRLVREYDTICLEDLHIPGLLKNRRMRALIQRLGWRRFRALLKAKCARAGKQLVIIDRWEPTSKQCSDCGFVLEQLRLDVRKWTCPGCGARHDRDVNAAKNILAAGLAVLAEQRARARATAEPEPAAGKACGAHVRPRGHSPPRQRAAKQEADLSDEVRPFSGRNGRE

SEQ ID NO: 3582 - protein, 400 aa, unidentified
  REGION 1..400: note = Table 20
MRTAYKCRAYPDPEQAAIFGRTFGCVRLVWNKTLAERHRAWHASGRRTSYAETDAALTAWKKTQELAFLNEVSSVPLQQVLRHQHAAFAGFFAGRARYPRFKNRTSRQAAHYTRSAFRIRGGQLQMAKTTTPLEFAWSFQKVDLASLNPSMVVISRDPDGRWYVTFAVDTDTPEPRPAAGHAIGIDLGVKDFAVTSDGDRIANPRHLARKAANLARYQRRMARRQPGSANHRKARTKVAAAYRKVRNARADFLHRTSTSIADRADVIVIEDLAVANMVRNRRLARAISDCGWGEFRRQLEYKAARGGRTLVVIDRWYPSSKTCSHCGHLLAQLSLSTRHWTCPGCRTRHDRDINAAKNILAAGRAVTGYSPGDVCGADVRRQGPSLPQSAAKQKHPRREP

SEQ ID NO: 3583 - protein, 199 aa, unidentified
  REGION 1..199: note = Table 20
MNPTMVVARGPDGRWFVTFSVDTDEPELEPEAGRAAGTDLGVRDFAVTSDGERIANPRHLDRKARDLTRYQRRMAREQRGSNNRHKAKEKVARAHRNVRKDFLHRTSTNLVRYPSPETCSVCGHLLDHLKLATRAWTCPGCRTRPGSQRGQEHPCGSPAGPLKGGEEVKSLLRPPPMTLSATLSPMPVIGASSRAVSVR

SEQ ID NO: 3584 - protein, 1154 aa, unidentified
  REGION 281..287: note = misc_feature - Xaa can be any naturally occurring amino acid
  REGION 1..1154: note = Table 20
MDRFGQTAVFSGRRPGTCPEWCRRWLRSRSRAVFADGVQRSVTSGKYGLTCCYVVFLRRGPGGNTVVGRDVEPGESTVGREVTKVVPISDPASKGELMFERFTDRARRVVVLAQEEARALNHNYIGTEHILLGLIHEGEGVAAKALESMGISLEAVRTEVEDIRGTGGHPPSGYIPFTPRAKKVPETLKDKQLYSLDLGSLVAGSRYRGDFEERLKKVLKEINQRGDIILFIDEIHTLVGAGAAEGAIDAASILKPKLARGELQTIGATTLDDLSRSRNRXXXXXXXYEAHHRVSITDDALVAAARLSDRYINDRFLPDKAVDLIDEAGARMRIRRMTAPKAIQDVDDKIAEVRRAKEAAIDDQDFEKAASLRDDERKLTDERAEKEKQWRAGELEDVAEIGEQEIAEVLGAWTGIPVVQLTEEETSRLLHMEDELHKRIIGQEDAVKAFTASRLFGAPPGYVGYDEGGQLTEKVRRKPFSVVLFDEIEKAHSEIYNTLLQVLEEGRLTDGQGRVVDFKNTVLIFTSNLGTRDISKAVGMGFSSTGESDEKGQYERMKSKVNEELKKHFRPEFLNRIDDIVVFHQLTQSQIVEMVDLLLGRLRKALADKDMALEVSGKAKDLLAKRGFDPVLGARPLRRTIQREIEDHLSEEILFGNGVRQPERGVAVGRAEFQHGGGGDALDQCVEDAGALRFEVAPPLGPVRSCGVEGPPLGGEAVQVGGEFGGHGQRVGDRRIMMPGTTVKRAYRFRFYPTPQQEQELLRTWGCVRVVYNRGLAMRTHGWEQDQRRVSYAETDRALTGWKKEPEFGFLAEVSSVPLQQCLRYLQTAFVNFFAKRAKYPRFKSRKRSRLSLTYSERGFRFREGRLFLAKMTEPLDVHYSRGFDATTASSVTVTRDGAGRWFVSILCEEEVADLPVTGKTVGVDLGVKDAVVLSDGRKLSPSDSFDVKKKQARVAKCQRRLAKTSKGSNNRVTARHKLARATAALADAKRDWLHRTTTQLIREFDVICIEDLNVRGMTASARGTVKHPGKNVRAKAGLNRGILNHSFGEFRCLLEYKAGWYGREVVAVDRFFPSSKTCSACGAVNENLRLHHRVWRCPSCGAVHDRDINAAKNINAAGLAVYACGDGVRPVPGPAVMQDPGPAVVGEPGRSRP

SEQ ID NO: 3585 - protein, 418 aa, unidentified
  REGION 1..418: note = Table 20
MTTHTVKRAYKRRFYPTEAQAAELIRTFGCVRVVYNKALHYRTNTWYEQGERVSYAQTDKALTGWKKEPELAFLNEVSSVPLQQALRHLQTAFSNFFEGRAKYPKRKTRRKSRLSATYVRTGFRVKDGSIYLAKMSEPLTLATGDNPVPWEGVSSVTVTCDSAGRWFISALCETEIAPLPTRGKTVGIDLGVKDALVLSTGQRLNPTDVYDLPAKNKRVTRYQRALSRKVKGSKNWEKAKLKLSRAHAAARDAKTDWLHQTTTTLVRTYDVICIEDLNVLGMTKAARGKGRAAKAGLNRSILDHNFAQFRTLLEYKAQWYGKQVVAIDRFFPSSKRCNTCGVVREYLSLSARFWTCKACGTRLDRDINAAQNIHAAGLAVYACGDGVRPAKKPLAGFKGGLSLVKQETPGSDAGNLLP

SEQ ID NO: 3586 - protein, 252 aa, unidentified
  REGION 1..252: note = Table 20
MKRAHKYRFHPTPERADLLNRTFGGIRLVWNKTLAERNRRYTDEGVSTLSVDTATWLTAWKQDPELEFLREVSNVPLRQALRRQQIASNNFFAKRARYPRFTSVEEEISPLPPVDAQVGMDAGLTHLLTLSTGEKITKVPTRLVRENQTLAIEDLTVRNLVKNHSPARAISDASGRELRGMLAYKSAWYGRRLAAVDRWFPSSKLCSARGCGHVNGSMPSNVRSWSCPACESLHDRDVKAAKNILAAGLVER

SEQ ID NO: 3587 - protein, 414 aa, unidentified
  REGION 1..414: note = Table 20
MDESRDFDAEMSLTGEDRAGIFAPPLAGHLHQPACLGGLKDGPTALLRLPVAWAPGAATGTAPGPPDQSIASPVGRPTSRHEFSADSPRTAQQPSCDHSREAGVQVPLRSGRCAGSGAVAHVRVRGEGLQLAFAARTEAWARQERVNYNQPSAMLTVWKKTGELAFLNEVSSVPLQQALRHLQGAFANFFSERAKYPRFKSKRKSRASAEYTGSAFTFRDDWLKLAKMAGPLDIVWWCDDPTVKPLAATDAAVGIDVGLDHLPALSTGGKIANPRHERLDRAHLATAQRHCARKEKCSANRDHGPAQGRPALADHSTRARNPDARDRGPDRAQYGQEPETRPRHQRCRVGRVPEPSGLQGSLVRAGRGDRGPLLPLLRAELTVPHRRGRPWRPAAQGSTAGHRPTDRERAPAEC

SEQ ID NO: 3588 - protein, 196 aa, unidentified
  REGION 1..196: note = Table 20
MKRAFKYRFYPSETQAAELLRTFGCVRKVYNLALQARTEAWNQSRERVGYDTTSAMLTSWKRTEELAFLGEVSSVPLQQALRHLHTAFLRFVPLLCEDPSVVRMPAVDSAAGIDVGPDHLLVLSSGEKIANPRCTKAERHALGCGCGVTHDRDINAARNILAAGLAATVCGTGVRPQRSTPGGRSVMKQKDLRREL

SEQ ID NO: 3589 - protein, 347 aa, unidentified
  REGION 1..347: note = Table 20
MLLKQDAERVWLNEVSSVALQQSLRHLDKGFANFFAGRAKYPRFKSKRDSVQAASYMANGFTLRDGNLTLAKHDAPLDVRWSRPLPEDVKPTSVTVTRNAAGHYHVSILVDVDVLPLPVTEKVVGIDMGLAHLAVTSDRQAIDNPRHLARKLARIQRWQRKLARKREAAKASMGLKGKSDPKGTRIPRSNNAWKVARRIARIHASVRDARRDHLHKVSTKLIRENQAICVEDLAVSNMVKNPNLARAIQDAGWRELRSMLEYKAALYARAFEVVNRWLPTSRRCSCCDYTLESLPLSTRSWTCPGCGAEHDRDVNAARNMLAAGMAQLHSTAGLAGIHACQVPKGAT

SEQ ID NO: 3590 - protein, 383 aa, unidentified
  REGION 1..383: note = Table 20
MKVNKAFKYRIFPNDEQKKNLAQTFGCVRLTFNTMLAARTKAWQQNKQHLSYHDTAQMLTTLKKQEDRIFLNDVSSVCLQQTLRNLDCAFRNFFAGRAKYPTFKKANSNQSARYANNAFKFADGKLTLARQTEPLEISWSRPLPDDAKINSLTISKDTTSRYFISIHFETDWSPLEDLQTSVGIDVGTKTLAVLSNGENLENPKFLPLAEKRIKKLQRRVYKKVKGSNNRRKAKLKLARADASVADKRQDYIHQFTTKTIRENQTIIVEGFSVANLLKNHCLAKSIANASWGEMFRQLEYKAEWNGRKYLELDRFFPSSKICSSCSHLLVKLPLSVRVWDCPNCSTHHDRDLNAAKNIEIAGQYLLCSESDARKLTPKRYDSR

SEQ ID NO: 3591 - protein, 451 aa, unidentified
  REGION 1..451: note = Table 20
MNFQRAYRYRFYPTEVQAQQLARTLGCARYVYNWGLEEQIKNRRDQGRMLPYKELAAQLKILKRQPETVWLCEVSSVVLQQSLRHLDSAYKRYFQNLSEKPTFKSRKGDQSCSYMANAFVYRDGQITLAKHREPLDIRWSRPLPDKAVPSSVTITRTASGKHYISILVEESIEPLPTSQHQVGIDLNAKALVLSNGKSYQTPKNLQRLEIRRRRYQRACRRKIAAAKKSLGLSPRAPLPKGTRLPVSNNLRKAWRKVGRVAERQANVRRDWAHKITTAIVRENQVVAMENLNVRGMTASARGTQEKPGKRVRQKAGLNRAVLNVGFGELRRQIEYKALWYGRQAVVIDRWYPSSQLCGACGFKHEKLTLNDRHWTCPNCQQRHDRDLNAARNILVAGQSMLQQEQSLYRGTSRESKPVERALVADRHQPDCTPTCREAGKVVCENDPARQP

SEQ ID NO: 3592 - protein, 377 aa, unidentified
  REGION 1..377: note = Table 20
MKAAAKFRFYPTPEQETLLMQSFGCARKVWNMTLDACKKNYQQKGKFLNAQERNAFLTALKKNPEYDYLNKVSSVCLQQKVIHLGKALDAFFKKRAEFPVFKKKHHRQSISLMKNSLMIKSGQVYIAKCKEPLNIRLSLEFPVNFSSATISRTASGKYEISVVYDRQQHKLPVNDKVCGIDLGLKDFLVFDNGIKIPNQKQYLKYEDKMKFLQRKLAKLDVRRKRLKLSVKQCNGKRNKLKRRIAKLHEKISNIRKDNLHKITRNIINENQVICVESLQVKNMICNRRLARVIADAGWGEFIRQLTYKAEWYGRTLVKMDKFYPSSKTCSCCGYIMKELPLNIREWSCPDCQTTHDRDINAAINIRNQWAVGVSLQS

SEQ ID NO: 3593 - protein, 398 aa, unidentified
  REGION 1..398: note = Table 20
MHKSFRYRIYPNKQQKNLINQTNGCCRKVYNNILAKVNMTYQAYKDSLNTTNPILKPEFPTSYTLINMLPTLKVEFPYLYDVSSTALQQTVMDLGASFTNFLKSKAKYPRFKKYSYKNTFRLTIDGFRFNNDNLYIAKSKKPLKVKWSRKLPSSPTSLTISKEPSGEYYVSFLCKTTDYRQVAYKTQTVGIDLGLTDYATLSTGRRIANPRNLKRYQKRLARLQMHSARKHKGSKNRQKCNIKVAKQHNRIANLRKNFIEQETTKIVRDHQFIAVEGLKVANMLKNHKLAKGISDASWGIFLTRLAQKVTETKESILITADTFYPSSKLCSCCGHKILSLPLSTREWICPECSTKHHRDLNAAFNLENILENNLDYLVSESTIYGPKILVANSAGMLH

SEQ ID NO: 3594 - protein, 394 aa, unidentified
  REGION 1..394: note = Table 20
MTTITKGYKFRLEPNQTQRDLLVRSFGHTRFVWNELLAQSKIQYELHKFNGLVDKPNLNEIELVNKITNLKLFHPWLSEVSNVALQQKVRDLASAYRHCFRNLKQGKIAFPKFKKRNNRNSFRLTKNGFRLKDGELYIAKCDQPLKVRWSRDLPSEPSSCTISQEPDGSYYVSFVCQVDPKLTNGVKQTGIDLGLTDFAILSDGGRIANNRFLVQALNQLKRAQKTLSRRKKGSKNRNKARIKVAKLYQKVTNQRNDFLHKLSRKLVNENQVLVVESLNVGGMIKNRHLARGISDVSWSRFIGYLTYKSKESHHCSLLMMDPFYPSSKLCGSCGVKYENLKLSERQWTCFNCHTTHDRDLNAARNILAKGLETFKNLSPDYSWLSIPVICNRFN

SEQ ID NO: 3595 - protein, 403 aa, unidentified
  REGION 1..403: note = Table 20
MNTKEQPFKKGYKFEIYPNIEQKELLENTFGCCRFVWNKALDNAKKEYEFFLAHKDLNPSNIILKPNLSGYEFVNRLIKYKSDPETQWLNDVNSVALQQTMLHLGTAFSIFFKNRKGYPAFKKKHNRQSFSLMTNSFRFKGEQLFIAKSKDPLIVGFSRKLPSQPSSATISKSPTGRYYISFICEYIPTKTNGKGKIGIDLGLKDFLVTSDGIKIPNPKHLKKHEKRLKRLQQSLSKKRKGSKSRNKARIKVAKQYEVVSNCRNDFQHKLSRILVNENQVIGLEKLIVKNMVKNRKLSKAISDVAWGSFTSKLNYKAKESQNCKLVYMDCWYPSSHICNVDHIQLDRKLSLSERTWKCPHCNTIHDRDINAAINIRNEAILTIELFQLQTKAGHVTFLANRPH

SEQ ID NO: 3596 - protein, 293 aa, unidentified
  REGION 1..293: note = Table 20
MLILKAYKYRLYPTIEQQEYLNQTFGALRHNKLKISKLELPVEVKWSRELPSIPSQVTISKTPSGEYYASFLCKVVPKVTNGSDIIGIDLGVKELVVSSDNQRFPNPKVLYKKQHKLAKLQRALSRKIKGSNNRNKARIQVAKLHNQISNIRKDNIIKLYRILVNRSKVIVIEDLKVTNMVKNHCLAKCVSDASFGIIKQTLTWMVAESHWCNIVEASPFFPSTQLCSTCFKKSEIKLELKDRLWKCSNCNSIHDRDLNAAINLRNLATSVDHIYNITKSSGKYIQLDHVTNC

SEQ ID NO: 3597 - protein, 398 aa, unidentified
  REGION 1..398: note = Table 20
MFQLVEKAYKYRFYPLKQQKEILEKTFGCTRMVYNHFLDLRSKTYKEEKKSINYNDTSKFLTSLKTKNPWLKEISSVCLQQSLRHLDRAFISFFKKKSKYPNFKKKRNRQSAKYMKTSFIYENDKITLAKMKEPLNIRWSRKFKDAPTSLTITKENDDTYYISIIVKEKIEPLDFKKKKIGIDLGIIDTITDSNGKSTKNPKLLNKALKKLRLRQKSLSRKLKKSKNRIKARKKLAKLHLYIKNKRLDFLHKLSWQLVNENQVIAAERLNIKNMLKNRHLAASISDVSWKQLITFLEYKSKWYKRIFFQVDTFFPSSKTCNSCGHKLATLALSVRKWNCPNCHIVNNRDENAAKNVLDKAITEIKEKYRGTLGNVSLWSLCKTFLEDPKKATNCESGT

SEQ ID NO: 3598 - protein, 365 aa, unidentified
  REGION 1..365: note = Table 20
MKEILRSYKFRIYPNAEQKEQLAQTFGCARFVYNWALSNKKEAYENNIKKSANDVSKELTALKKDPNFIWLKDVSSVCLQQSLMNLDNAYQRFFKKQGGFPTFKKRSNRQSARYVKSAFTFKNGQLKLAKQDKFMKVKFSRPLTGDINSLTVSKDPDGKYYVSFLVKETYQPPNKSAKQIAIDLGIKDFATFSDGSKVANPNHLFKSLSKLKGLQRNLSRKKKGSKNRNKARIKLARLHSKIANQRSDFLHKLSTQIVNENQVICVEDLAVKEMLQQNKLIAKLARNLGWRNFLTMLEYKSGWNERQFIKVDRWFASSKTCSACGSINKELKLSQRSWVCSCGAKHDRDHNAAKNILREGLKDIH

SEQ ID NO: 3599 - protein, 364 aa, unidentified
  REGION 1..364: note = Table 20
MKKITKQCRLYPNREMKEALDKYFGCCRFVWNSLLEETYHYAGIINQPYLNSLLTELKTKHDFLKDCSSVALQQVTFSLASAWSAFFNNVAQKPRFKSRKMGHNSFKLVGDCVNGVGTKYVHFPKIGECKYKNSWGNLSKISSYVVSKKRNGKYYISFLVEVELKPKTQSGMVGIDVGLSYFATCADNQGNHWKINNPKFLLKRQRAYKRASRRLSRKVLGSANRNKSRNRLAALVGKTVNQRNDYLHKVSTELVSKYQHIVIEDLNIRGLLKNNRLAKHISDTGWGEFFRQLHYKALMYNTPIHIIKAPRWYPSTQICANCNSKREVRLHLNERSWTCNYCGASHDRDINAAQNLLKQVLSSR

SEQ ID NO: 3600 - protein, 380 aa, unidentified
  REGION 1..380: note = Table 20
MEYLTTQRSRLYPNLDTRLVLNKTIGCSRFIWNALLGNHKEEYGLWVEDPETHPKPSCSLSSFNQKLNELKVEYPWLNEVSSVALQQTVLHLTKAFSEFFQGIHGYPKFKSKRDPGGFNLSSAAGTLAKDGKIRIPKIKGYTTCRPKLPLDQEIRNYSIVKDRVGNYFVNCLVTKPCLPNTAKGQGLVGVDLGIKSLAVAKRSTGEIFTLENPRTYMKYHRRRVRLQRRLAKKQKGSQNRNKARIKLAKLERKVGNIRKNTLDTFTSKLISENQVISIEDLNVKGMLKNSRLAKHIQDCGFSTLRRMLEHKAKRYESPVIISLVHRFYPSTQCCSACGIKREIKLTLNDREWTCAECGTSHDRDINAATNILYEGLRLVV

SEQ ID NO: 3601 - protein, 393 aa, unidentified
  REGION 1..393: note = Table 20
MLKGYRYKLDLTPEQYHSLSQTCGNCRSVYNYLLGKQKEEYAKTGKFIRFKDMSKMLTALRNGDERPWLRDCSRVPLQQAVINLDRALTNFFNSRKKAAAGEGGQKAGFPAFKCKHRSEDTAKYVNGVAVDFVKRTINLEKVGKVKFLRNREFPSGSKIINATVTRDRCGDMWVSVLVEDGSSPVPKAKVSEEGAVGIDMGLKDLAILSDGTVYENPRYMEKLLGKIKVIQQAFSRTKAGSNRHEAMRRKLAKLYRKLRDCRVDYIHKMTCALTDNFSTVVIEDLSVKGMMSNHNLALHIQSASWGEIERQLDYKCKWKGVNLIRIGRFFPSSRTCSVCGYHNPDLTLSDREWTCPECGTRLDRDLNASVNILKEGLRIHLEGTRSKTAEAAT

SEQ ID NO: 3602 - protein, 414 aa, unidentified
  REGION 1..414: note = Table 20
MKPTRSQEAFLVKCFGCARFVYNHALRERMDAYTSDKKSLSFFDQCASLRELKKQEEYSWLNDVPTMMLNYSLLNLSNAYGHFFKTKSGFPKFKSKKNHKDSVKFEPNSTRYDFIKDKVRIPKLGWVRICRDRPFDASAAKVNSTTVSRDACGTFWCTVSVDDAAPSEPKAKVTEEAAVGIDVGISDFAVLSNGAKLPNMRFSESEDRRIAVMQRCLARKRKGSKDRPASNRHERYRVKLARVHRRVENRRNDFLHKTSTSLVRRYGTVCVEDLNVKGMMRNHSLAGPIASASWSSFVRMLEYKSEWYGVNLLRAGRFDPTSQTCSACGYRDTRLKDLSFREWDCPQCGTHHDRDVNAAINIVNAAINKYFNTKSPAVTGITDADGADSENNAGTGSRACDYASDETSMRRVKR

SEQ ID NO: 3603 - protein, 326 aa, unidentified
  REGION 1..326: note = Table 20
MMYPLSVCLVQSVRDMSSAYQMFFKTKQGFPKHKTKHRSKLSCRFPSTHCSVDQDSRHVKLSKIGLVRYKQDRRFKGQLRNVTVSCDGCGRFWASCLVETGVQEPKPEPITSQSKCVGLDLGLKDFIVTSDGRKIPNPRFADVIDRRISRLQKIESRRQKGSRRRSEIRLKINKLYAKKRNLINNFIHHTVNSILGENQAVFIEDLNVKGMMSNHSLAKSIQNICWLEFVRVLDYKARWLGRTVLKIDRFFPSSKTCGCCGYKNDGLTLSDRTWACPQCGTIHDRDLTAATNILKEGLAKLSPSVGRFDGRGDGGYDVVESPICAV

SEQ ID NO: 3604 - protein, 384 aa, unidentified
  REGION 1..384: note = Table 20
LKPLKQEEGNEWLREVSNDSFQRVTENLANAYTGFFGKTKGFPKFKSLRHTKPSASFSDKPKVVYDGDGTGRLQVPKIKGLKFRSGYAMPHSDKLKTVTISRDRLGNYFASLCFEISKSEVPKLPYDEGNTVGIDLGVKTFAVMSNGKAIDIPQNVTALDKRIERQQAVVSRSVMGSNRRQKEVRRLNVLHISRANRRLDWLHKTTRQLVDENQIHCYAVENLSVAGMLHDSSSSLARKIQDSCFGMFKSLLRQKLDAVGKTLGEIHRYEPSSKTCGACGFVHKALTLAERSWTCPSCGVNHDRDLNASNNIKRMWLLGSNKENKLTPSGGRLADCLPFADSCAEDVKPSGVASTSADSVSSRKGASRENACCQARRAVSAQSV

SEQ ID NO: 3605 - protein, 474 aa, unidentified
  REGION 1..474: note = Table 20
MRESDTLERAYRLRAYPTRPQQRAIGRLIGAARFVWNWALWRRSDAYKADKSQLNWIALSRELTVLKRAAETAWLAQLPREPFNQVLRDQERAFANFFAQRARYPRFRRRGGKASVRFTLDQRRAQVARGTGKERWAYVQLPGLGRVKLRRTEALMGRLRSVTLSRDGAGRYFAAITADGVPLTEALAAKVAAVGVDAGLRVLATVHDGERARPFPAPKALAGRLARLRRYQRHQSRQLAAQMRAQGLDPTQPCPKGMRLGVSKRRHRTRRRIAREHARIADLRRDALHRVSTGIVREAKVIAIEALRVKAMARGMGRRAFRRGVADAALGELRRQITYKGAWAAREVVPIDPFYASSKTCSGCGAVNAALKLQKHWQCFACGAQHERDVNAAKNLRAEGLRVLGMRGSSPATGERPESNARGVACAADAAAPVTVLPLQRRPTANREPAQSAARRETRRAPSGTARRRVRAGL

SEQ ID NO: 3606 - protein, 423 aa, unidentified
  REGION 1..423: note = Table 20
MKQKSYRFRFYPNKTQKKLLTQYFGAKRFVWNTCLAWRSNFYKENKESVTGVDYSRELTWLKKFEPYSWLKEIPSSIATQCLRDQDKAFKKFFKEKETGYPKFKSRHRQQSIRFQMDQRVVMNNYRAGSLLKIPGLGKVKITWSRNPIGIPKMVTVSLDTAGRYFVSMGIEEAIQTKPPVEKAAGIDLGTLTSMTLSDGYEVPNPRHLLKRKYQLKKLQQRLARQQKDSNRRAKTRLRIGKLHARIADCRREYCHQVTTKIINENQVIVLEDLNVKGMTASSKGNKEKPGKMVKQKSGLNRSILDVSFGEIARQLEYKADWYGRTLIKVDRYYPSSKLCSTPGCDYKADKMPLKIREWTCPQCQAVHDRDINAAINIKNEGLRSIAPAGMKGLQLRDSASEGVYSMTVSPRNYDQPNSCQERL

SEQ ID NO: 3607 - protein, 387 aa, unidentified
  REGION 1..387: note = Table 20
QWAGCARFTWNHSLAMRTKAYQRRGETLTSVDVSRHLTQLKKHPDFAWLAACPATVLTQTLRDQDRAFKNFFQGHAHYPRFKKKKHGFSIRFQLDQRRIADIYRPGGSIKIPKLGTILPHWSRIPKGIPKMVTLTKTPDGRYYVSFSVEEEILSLPKTNEAEGIDLNMGSFVLSDGTAIHLPRPLRRLEKKLAHLQRLFSRKRKGSRTWHRTRRKIARLHAKIAAIRLDFLHKLTTWLVRTYDAIGIEDLAVKAMARGMVGGKAVLDVGMSLFRRLLEYKAQWYGKKLVVVDRFFPSTRLCSTPGCGYISNPIPLHVRTWTCPRCGATHQRDVNAARNLKAAAVEAYSTSSGNGEYTRGEAGSGPGAVLQGETGLCEARRPGFCFVR

SEQ ID NO: 3608 - protein, 403 aa, unidentified
  REGION 1..403: note = Table 20
MPTIQRSYKLRIYPTAVQAQRLACDFGCARWVWNTCLAWRSNLYRAEGESVTGVDFSRELTFLKRLPGYEWLADAPATILTQKLRDQDQAFANFFAGRAKFPRLKKKGHAQSIRYQLDQRIVAGLYRPGELLKVPKLGALKVRWSRVPAGIPKLVTISRDAAGRYFAAFMVEEEVQPLPEKPNGVGVDLGVKDLAITSDGARFGNARPLQRLLRRLKHAQRVLSRRRKGSGNWHRQRQRSARLHVRIADLRRELTHQASHAIVTGAGLIAIEDLHVKGMCASAKGTLEQPGRRVRQKAGLNRAILDAALGEVRRQIAYKAEWNGRVLVVVDRWAPSSKTCSHCGHVLGALPLSVRAWSCPNCGTAHDRDVNAARNLLAWATGGGAGTRNDACGAVTIPEALTA

SEQ ID NO: 3609 - protein, 400 aa, unidentified
  REGION 1..400: note = Table 20
MSTVVSKSYKFRFYPSSAQRQQLAKDFGCARFAWNYALERRTKAYQESGERLTGVDLSRELTKLKNSTHLWLAEANSTVITQALRDQDRAFANFFAGRAKCPKFKKKRTAQSVRYQLDQRQVHRTFNAQSHSLALPNLGPLKLRWSREVGGVPKMVTVSRDACGRFFVAFSCEVEAQPLPDLSAPARAGGCPAQAGKTNLIGIDFGVKDVVVTSEGEKSGNPRHIKKRERHLKRAQRRLNRKTKGSHRYRKQQFRVARLHARVVDARRDFLHKTSWKLVSENQALAIQPHNVQGMFANHKLARAISDVGLGELTRQIKYKAQWYGRQVFEVDPWQRTTGVCPDCLRIGPKLALDVREWRCECGKVHDRDVASARVIKIVGAGGPEVMRVEGGTHRLAAAV

SEQ ID NO: 3610 - protein, 384 aa, unidentified
  REGION 1..384: note = Table 20
MKAYKLRFYPTLRQRRQLEKEFNACRYVWNWALDRRSRVYKENGKSLYAVALSRELTLLKTSQPFLKAASATALTYVLKSQDEAFQKFFKKQARYPKFKRRLRVRSCTFQIDKRRGEKVFIPGAFLQLPKLGPVRVVWSYRDIPVMPNSATVSRNAAGQWFVSLQCECIDVINPPATDNTIGLDLGLSTLVAMSDGRKEKPRRFLKNALRRLRVAQRRLAKAARGGSNRRKHKSRVARLHQGIASKRANFLHGLSTSIVRENQAIAIEDLNVRGMMANGKLARSVGDCGWYELRRQLTYKAKWYGRQLNMVPRFQRTTGVCPDCGTVGSRLPLRVRSWTCGHCGSAHDRDIAAARVMDLIGNTVGSTGIDACGLAHKPEEAVSE

SEQ ID NO: 3611 - protein, 255 aa, unidentified
  REGION 1..255: note = Table 20
MKLPKLGALKLKWSREVGGIPKMVTVNKDPCGHYFISMACEVEILPLPTRKNAIGVDVGVKDVVITSEGYKSGAPKYTYRYARQLKMAQRRLSKKPKGSGRRRNQQQRVARIHARIADSRRDFLHQQSSKLINENQVICLEDLNIKGMLRNRRLSRAIADGGLYELRRQMEYKASWYGRDVLIVDRWAPTSKTCSACGTVIDTMPLKIREWVCPDCTAHHDRDINAAINVLSFGTAGSAGTHKARGAVKTPRAVA

SEQ ID NO: 3612 - protein, 429 aa, unidentified
  REGION 1..429: note = Table 20
MIPAPGPKSVTLRPESPVTMRRNQRSRSIGMGGHDGPEYAWVWNHGLERRSKAYRRRGESVSGTDISRAVTGLKKTRRYGWLRAIPSSVLTQKLRDQDAAFGAFFAGRARYPRFKKRGGPEAVRLQIDQRQRKPRAAWECGEVFVPGLGALKSRHGAHPGQAPKMVTIRRDAAGRYFVTAMVEEAPWQRPAPRHASVGIDLGLKDLAVLSTGERIPNPRHLRRRQRRLKRAQRALARKQRGSNRWRRQRARVARLHAQVTDTRADALHKLTRRLVDETQVLCVESLNVRGLARSKLAGSVHDAAWGELLRQLTYKAAWAGREVIAVAPYTPTTRTCSACGAVTGPSGMAGLRVRHWSCTDCGCGHDRDINAAVNIRALGMTQCLPGGAGDVMRVEDGRPLATAGHAAGGWQASFETRTDQAPPTLDGTG

SEQ ID NO: 3613 - protein, 445 aa, unidentified
  REGION 1..445: note = Table 20
MTIRAYKQEIRPNAMQRAELNQYFGAGRWAFNFGLDMISKAYARRKDGVNYIGVSKLITKLKKTSRYAWLNEIPSDVVSQKLRDLDRAFQNFFAGRAKYPRFRKRKASASIRFNFDPRHCGKVKAWANGEMVLPKLGKIKLTEKLPAGMPKLITISTDGTGRYYASYAVDQVIQFKPKTSSMVGIDMGLNHLATLSDGQKIENPKFLKSLLKTLRIRQKSLSRKRKGSERWKYQARRVAKVHARIRDSRRDYLHKATTAIVENQDVIFVESLHVKGMARNPKLSRTIHDTSMGEFLSMLRYKCEWYGKEFIEVDQWYPSSKTCSCCGHRLDELDLSTRSWTCPKCKAEHDRDVNASRNILAEGLRIRAGSPDFKRVENRALASNQSLNGSETRINEARIVGEPKIPYGTGSRGRMTNSRVAFLMLNSEGDAADKVVEKTGLQEEV

SEQ ID NO: 3614 - protein, 465 aa, unidentified
  REGION 1..465: note = Table 20
MIADAKLAPVNTVHRAFKIRVYPTQDQKRLFARTEGACRFVYNRSLEHIKASYEAKKAGFVERADTPIDFSRVVTQWKKQPETAWLSEVPSGPLGATLRAQDEAFKRFFKGVARHPKPHRRRMACSIQSSLDPRHKDKAAAWADQKILFPGFGIIKVAQPERIPMEQPKMLTLSRDSCGRYFIAFQVSVTLEWMPASVNDRIVGVDLGVKTLAVFSTGESRQVHQAERKRRRRLKHLQRCLSRKVGSRKGEKKSRRWIRQRQQINRLECRISDGRRDTQHKLTTHLAKNYGVICLEDLHVKGMMTSAKGTPEAPGSNVAQKAGLNRGLSNAGFGEIRRQIEYKSVSMGGIVLFADRFAPTSRTCSACGSYQKEFSLKIRKWICPTCGAVHDRDENAAKNIAAFATGSYPGSYGGETPDVMRVEGQIHPTPKGAIPRICQGPDEARTESLKSSKIMPTKAWKPRAE

SEQ ID NO: 3615 - protein, 441 aa, unidentified
  REGION 1..441: note = Table 20
MSQAVQKAYKIRAYLTPEQRRAFAQAEGATRYVRRRVLGEMDAHYKATGTRKSLLAMGREVTQWKQAEETLWLKDIPSDVIIQELRDLKQAFEHFFRALKTKGSGRKVGYPKPKRKSASGAIRFAFDHRHPGKVAGWTGKKVILPKLGMIKLAQPERLPVEMPKLVTLSRDSSGRFFISFSVRQMIEALPVTGVSLGVDLGLIDLAVLSDEARIPAIKGLKKKERYLRRQQRTLSRRQGSKKGEKKSRRYLKQQQKVNRIHCRISDARRDYAQKASRALIKKADVIALEDLNVQGMMKNPRLSKALSDAAFRLLRTCLEYKGKWYGRTVCYADQFVPTTKTCSVCDHRVEEMPLSVRTWTCPCCGTLHDRDINAARNILRFAVTLGEGEGAYPEARGGVNPLREGAFAPLLKDSVETRTENRLPRFREGHAPEDHDDSRVS

SEQ ID NO: 3616 - protein, 503 aa, unidentified
  REGION 1..503: note = Table 20
MSLDDVQADVPTEADVLASFPALPDVMDPPDLVQQASVFRIYPDDTQIAAFRQWIGAARWLWNRYVEINQHLYDYEGRFAFQQELSSLLPQMKKAQGLEWLAEPPASHIVDVSCRFDQSLRKFLDDKQAVRAGRMSKNAAAGFPRFKSKRDREGSVYVSGQNVRLIRREANPHAARGWVELPAMDQTEVWERTVKGGKRKGQVDELPKPLRKAIRIRGGRWPEGHVQSVTIREDAPGVWIMSVQYLGPPPKRKRRGEDIDVPDPEVAARGYDLGCSSAAVGSDGSRLEPDRPLRKRVKRLRRAQRRSARRRQARLDQAQEKKKDIPRSRRERRAYAEEARIHHQVRNARYNFTHQFTHRATAKAVVTCAEDLNVSGMIRNPKLALSVSDAGMGEILRQLEYKSEWRGRHFVKIDRWAPSSKTCSGCDHKLDELSLSTRRWVCPACGADHDRDENAALNILRWGLKEALRRGTPKVTPGESRALVGGKSRKGKRTRRNSARKAQ

SEQ ID NO: 3617 - protein, 421 aa, unidentified
  REGION 1..421: note = Table 20
MSAPAITRATVLRLYPNQQQASSLRRWQGGLRYVWNAALDCVFTSRDINGRWPTKAEIQTLIVGMKKMEGTEWISDIPAHALLTLADDLHKALVNWFNSLSGKRKGPKIARPRFRGKFARQFSVYMVNQHTSFGEGQVKLPKLGLVKYRGGDLPSGRLLSSRVYREADKWYMASIFECTAPVVNAAPVECVGIDMGLKTLATIYDGHSIREVPKLGALRKHEQRLKRYQRRLSRRVKGSNRRNKAKLSVARLHQRIANIRKDYAHKATSRIVAGAQTIKVEALNVKGWAKNRSISKSTADASVGMFLKMLRYKAAWAGRSLVEVGQWEPTSKTCSDCGAREPGVVLGVSRWVCSACGAIHDRDHNAAKNIYAYGEERRNVTGNTVESAWTGGDQAGAISPVPQVETRILKRAPRESVRSLA

SEQ ID NO: 3618 - protein, 264 aa, unidentified
  REGION 1..264: note = Table 20
MRWRSGLPRVVETWWVKSPSPKEDRGFFWRLADGRLIKINSGRVSYRGGHWYLAIQYEGPAPEYAEPKALAVGIDPGIRAMTAHDGEQSLEFARVPERSKKRRRRLDRKIARCKRGSRRHRKLVLTRSRLMEREGNMRRDRTHKATRKLIDHARIVGYEDPSAKAWQESGFFGEASREAAAGEFCRQIEYKGDWAGREVVAVPESASSTQTCYACRERTVHPLGKRAYSCPRCGYRARRDENAALNVRAAAIQGARAALPEAVM

SEQ ID NO: 3619 - protein, 412 aa, unidentified
  REGION 1..412: note = Table 20
MTAPVMQATKGHAYGGAVNGPLAHVARIGGQCRALWNLFLAETADRYRAEGKFLFYAEMSAGLPRLLKDDPRLAGLPHRAAQMTVQRLDRALRDCAKAKGGARKGFPRFKRRDDRRDGFQFVGRECRFETGRVRLPKVGWVRVRGLRLPAAAAPKVVAVTQEPDGWHVSVQFEAPPKPYAAPTRPVVGVDAGLLHLAILSDGARIEAPRLARKAEKRIRRLNRERDRRRKGGVNRRRTVARLARAHRAVRNARRDHLHKATRRLVDAYAGFAVETLSLKGLARTRLAKSFADAALGEMLRQLAYKSRWAGREWRELPRFARSTGVCPACDATGPKLPLAVREWACETCGAVHDRDVAAAGIVLRRAVGGASPEPAGAVRRKRGFAVRGGERAQVRSSHGGPPANVAEVMVHD

SEQ ID NO: 3620 - protein, 435 aa, unidentified
  REGION 1..435: note = Table 20
MDQIAIQKAARGKVVNLAASKASTINFMLRDQRRLWNWIHDLNSARYRESGEFLFYHESTALLTQQRRSGMFADGSAVAQQQCLRSYERALKDSFPNSKNRRGFPKPRKRTSQCSLRFPAAGIGTVRQGETLTHIKVPKIGLVRVRNLNVPTNSKINSYCLKREADGYWLSVQYAIAVDPPVNSNPSVVGIDAGLSVMASLSDGAQIEALKPLRKARKKLRRAQRIYARKRRGSVNRRRQAQRVARVHARVRNARRNAQHQLSRCLVDEHGLIAIETLSLSGLKRLKHQGFAWSDIGIGELYRQLRYKAQWAGGEIYEHPRFARSTGCCPDCGLVGPKLDLRVRHWACTQCGAQHDRDVAAAQWLELCAHTARTKVGAACSEPVEAQPRPKRGKSGSAPRPIAAMRPESSRHPVHGGPPANEPSDTVCTAHMSTG

SEQ ID NO: 3621 - protein, 278 aa, unidentified
  REGION 1..278: note = Table 20
MRTYRLGPAANAPRGLDPLGPVRRPGPARQEGDRRAGNAVVGADLGLSCLVADSLGGKVVPTRPLRVAQARLQRRFGRQETKEKKEARSRSSNQKRRQQAIARPHRKVAARRAHLLHKTSRDLMAKGRVIGPETLGLKALARTRLAKSFSDAALGEFVRQVEYKAAWHGREVRRLGRFDRSTGCRPDCGTIGPRLALGERTWACAECGTNHDRDTAAARWIARAVTTVGEGFADRAGRDAGESAGSVAPLRRGLGLRRKPSPGTANTTHLAPSGVESE

SEQ ID NO: 3622 - protein, 395 aa, unidentified
  REGION 1..395: note = Table 20
MITTAQKIMLIVDKNTASALNCACGCARYAYNWARDTWFAKKKSGQESVTCAELRKEFNAQKADWMYESPKGAMDQAIKNFVLAKKRHYENPELFGFPKRKKYKAKRSFYIENDKARIVDPTHVKLPLIKLPVRLAEPVRPESLSGKINNFVISKGSNDRWYISISYTYDDTNGLYGTGENGLVGIDMGVKTLMQMSTGECVANEHINKRHYKRLKRYQKMMSRRKYNSTHYKDIKKTFDKKNAYIKNFRKDLIHKATTEIVKRNMVVAIEDLNVKGMASNHKLASAISDCGFGTIRRFLEYKSAKYGTLLLKVGRFFPSSKKCSGCGHVKEKLSLSEREFICEECGLVIDRDTNAAINILAEALFNELNSRFNTDVARRKFTPADFVALASSLS

SEQ ID NO: 3623 - protein, 403 aa, unidentified
  REGION 1..403: note = Table 20
MALLAHKTALQPNKAQKKVLNQHCDFARNAYNAALSDFKAGLDNGEFRSVYDLKKLFNARKREAFPEIDGNLSMNAGKNAIHNFHDAVKRWQSGQNNFPKRKKHNSRSSFQIDNGVGSVKVSEDGNQHVILPKIGKVRLAEKPRWTGKVRRAVISRTAHRWQISMLFEVDEPEPPDTSRLPAEGCDVGISQLATLSDGTTFENPRALRVQERKLKRLNRSLSRKTYRSGGWWKAKELLARLHLRIRHIRMDAHHQATHRILQGISALGIESLSVKGLMKNRKLSKALADASLGGFLVKLKYKAVRRGIRIVEADRFWPSTKRCSSCGYVKKKVSLSERDYHCGVCGFQADRDVNAAINLKQLASSTDERLNAVGASITPTAVGWTRGRRKVKPNQTLIDFATA

SEQ ID NO: 3624 - protein, 404 aa, unidentified
  REGION 1..404: note = Table 20
MKRSSEQSIYPTHKVALNPTPKQVSLLMQNAGYARVAYNSVLNDWTENKSDLSWTAPALRKRWNIAKHTLDWTADMIQSVGDFAIEDLAKAIAEWGKYRKARKTGLPHRIVGYPKHRAKRKGLSFSYDPRRCRFNGRRINIPKIGWVKTREGLRFDGKIAKVVIKRDAKRWFACISVQQPKPEETLRREVVGIDVGIRTLAYTSRGLSYENPRPLEAALAKLRRLQKAVSRSEKINGREWQGYNLTKLRQEISVLHERIANLRSKWHHEIAAEIVAGVGKVRVETLNISGMIRNKRLARALSDAAMGRFLSILKWHCQKNGIHFERIDRWYPSSKMCSACGHVKSSLLLTERIYRCVECGHEMDRDENAALNIENAPTSGGVVEEPSDSLHFEAMSSEVTSKSV

SEQ ID NO: 3625 - protein, 490 aa, unidentified
  REGION 1..490: note = Table 20
MGAVYNDEGGRKHRPPPIRRCWRHRQMPKKSATHLKGLAKSHRIALSPTGRQATLMMEHAGWDRVAANWARGRFQLAWFGRTDERHADAWYAHVDVNPDGGQWLSDMELRKDFNAVKSDLFEWSCPLSQYVSKNAIVNMGRGLDSWGEYCKERKRGKPRRKVGFPPLRKRRRKIAFTPSNGRNSIQVEGPHVRLPKIGWVRMREALRFEGDIMGVTVSRKGGRWFASFTVDTCLPAPEARPGPDTGIDMGVSTLATMWDGEEVEEIANPKALARAQKSLRRLDKAIARSLNTHGKHNPSQRRDVLYAKRNRMHFDIANLRADHHHKATTQIAKRGGTVKVETLNVDGMKKNRRLARAISDVGMSEFMRQLEYKCAWYGTGFERVDRWYPSSKTCSACGAVKQSLLLSERTYRCNICGFECDRDENAARNIQAYTGHKEPARTLNALPGPARSVGEEMDVEARRTRRREACARPGKRLPDSPSAIPTGNGG

SEQ ID NO: 3626 - protein, 406 aa, unidentified
  REGION 1..406: note = Table 20
MLRTHKIALCPNKSQEQLLRQHVGYARFAYNWALARHIEQRQQGVWENGYVLRPAFNAVKPEIAPWSASLSQYAAKNAILDLHKALQRWGAYRRAVKANNKPRRVGHPKFRAKHGRCQSYQADNGPGTVTVDRKLVVLPKIGAVKMREVLRFDGTIRKVVVKFDGRRWFACVVVESEPAPHIEPEVEACGIDVGITTLASVAYSNGERETIANPKPLAGALSDLRRIDKAIARSKNVHGINKTSNRRLRLYAKRRRLHARIRDIRADHRHKTTTAITKRCGQLSVETLNVAGMMRNKRVARSLADASMSGWLTTLEHKADFHGRRFNKADRWLPSSKTCSECGEVKAALSMSERQYRCDECGHTDDRDFNAAQNLLAEVQPKRGGNISPDSNSSPAVPTKRKLQTA

SEQ ID NO: 3627 - protein, 442 aa, unidentified
  REGION 1..442: note = Table 20
MPNIRLHSREGFTYRQRSLRLDPNNRQATALARACGTRRWTYNWALEQQLRTYRETGTFVGPSELMHRIVELKRTPEHAWLGEVSKCAPQAAITDLHQALMSFLLKRRRSGGKVGFPRFKKKGAGRESVRLHGQVRLREGHITLPRIGRVRIRPAAPELVGRICSVTCYQEAGNWYVSLRLEVPAAEPPAPPPEGEVIGLDLGVRTLAVDSDGRSYPGARALRASLRRLARAQRELSRKQPDSRNRERSRRRLQRHHARVRRQRADHLHKITTHLARTKQVIVIEDLAVDGMLKSRWMSRSLADQSFGLLRRQLEYKCQAGGARLVVASRFFPSSKRCSVCGWIRTELTLREREYRCLNPACGAVLDRDHNAALNLRWWGEQGFPTDVAAGRAETENACGAGVRPERDRRRGVASAGAGDEAGTEHRHRGRRSLGLNPRGGS

SEQ ID NO: 3628 - protein, 463 aa, unidentified
  REGION 1..463: note = Table 20
MNQRSSAPPSSGNVEFQVFRFALDPNNKQRGHLASHAGGARYAYNLGLEWLIDSLEKRRAGGSESTPNASEMHRRWNRWKKIPQNDAMWWSTNSKCVYQEAFRDLEHAFNSFVASRRRKRRGRRLGFPRFKRKARTRDRFRLTGHFEVDRRSVQLPKLGRIRIHENASRFASGIEFGRIRITSATVGREADRWYVNFRVARTTRPSCTPSFGAVGIDMGINALATLSSGLLVIGPRALKSNLKKLRRVSKAHGRKCHGSKNRKRTAAQLARCHSRIAALRRDHLHKLSTYLAKKHGLIVIEDLSIQAMMSNRRLARSIADSGWGDLGAMLEYKCRWYGSKLIKASRNFPSTRMCSGCGNVKDALPLSLRQFTCDHCGLNIDRDHNAAKNLARWPAVAGRAPETQNACGEDVRPGRSRAGLDEAGTEQPVLASGSEPIAQAVAFSCGSIGRGRRTGGYRPSVAV

SEQ ID NO: 3629 - protein, 528 aa, unidentified
  REGION 1..528: note = Table 20
MTGATVFRRAYRYRLDPTPRQARMFLRSCGARRYAHNWAVDMIYSAFDERRVRTAAGIPVEDLPRALTFATLNNAFNDWKKGRTGPESRLPKWWLDRHPDLEAPEWLADHSWDVYMWAIYEVYDGLHRWFNSRTGKHGGKPLGFLSFKSKRRDSPRFKVAARPNGARPIDYRHVRLPKIGAVHTRDHMKRLVRGIEAGRVKLKQATIRQDRRGAWWIAFSVEESVATPVQPTRRMRHNGAVAIDIGVKALAVLSFGETVLNPRFMDSADRALRQAQRELARRVKGSKGHAAAQRRHARLHVKVAGLRRNYLHHLTSVLAQSFAHIAVEDLNVKGMVASARGTRAQPGRQVRQKAGLNRRIHDAAFAEIRRQLDYKTRWYGGTMAAVDRFAPTSKICSECGWRNPNLTLSDRTFHCGGCGISTDRDLNAARNIARLASEHTDHAFAQGVQAVRLRKPLPGHGQMRHFHRAANLAPRHGHSTIEAALPGLVGQTRRPGSQGPGVPDPHKPSSWQQGAQVQGPQLQSGTAH

SEQ ID NO: 3630 - protein, 202 aa, unidentified
  REGION 1..202: note = Table 20
MPARSDANPAERGALDLGVQALATLHTGERGRNPRHLRRAARKLTAEQRALSRKQRGSRRRTKQRARLARAHLKLARVRRDYLHKASRGLAERYRFIAVEDLTVAAMTRSAKGTMLKPGKRVRQKAGLNRSILDAAWGELTEMLDYKLTARGGRLVRVRAGGTSQACSGCGAHVPKALSERWHDCPRCGLSLDRDKNAAINI

SEQ ID NO: 3631 - protein, 544 aa, unidentified
  REGION 1..544: note = Table 20
MGTEGALTHRVVRVCLDDAALTPDQRTLLDRHAGTARAVWNWGLAARNAQQDALMAHVRAIALEQADGDETAAATFLDDRIWRTATIKAAPDELRRPLRAATLGRAFTAETRDPDSRFAWWATERHGVNRFAVSSSLQSLDAAFDRYYRDTGGHRSARRARPRKDGRPAAWPRFKKRGRATDAFALFNLVVASQDPWRVIDRAHRIKVPSLGSLRVHENTKRLRRLIARGGRPTSARFTRTGGRWYMSVVVALPAPAAGTVLSPAGAPRAAAPTRAQTRAGLVGVDLGVKTLATMSDGTLIANARHGRAAARRLARLQRRAARQQGPRKGIAPSKGWVTTQRAIARLQHDAAARRRGLVHELTKTLAASYAAVAIEDLNVAGMTGTPAARPDPDNPGAFLANGRAAKSGLNKALLDVGFGEFRRQLTYKTPMYGARLLEVARFAPTSKTCSTCGAVRTKLRLDERTYRCEHCGLVIDRDLNAALNIAALGHQALGTSPADAGDTKRRDQKDVDRERSVVLASQDLGPPRSAERATDSSPPTRAA

SEQ ID NO: 3632 - protein, 579 aa, unidentified
  REGION 1..579: note = Table 20
MTGAKQKTPIRVVRFSIDHSALTPAQVVAFARHAGAARQTWNWALGRWMDWRNNTKFYVDYKVFKAAGMGPGLSTDDLIQVIERAVSIRQDDKWMDAAWDEARQIHGEWDQFQKASTLQSLYLAGAQEPFDPSRDDGINPYHWWVTEGDKSGLPKAERHNVNSGATYTAPLRAFEEAVGRFYKLPGKKGTPKFKSKHDDEQGFCIQRLTETGLSPWRAIEGGHRIKVPSIGSIRVVQSTKRLRQLIKRGGKTTSARFTRRGGKWFVSVSVAFDLSAPRVQRPARLSRRQRAGGSTGVDLGVNRLATLSSGDQFPNRRLLRKSMAEIKRLQRKFDRQHRAGSPECFNEDGTHKKRCRWGREDGPAMSRSAQTTKRQLRRIHDLTARRRAGVLHEITKDLATRFELIGVEDLNVAGMTAKSKPKPDPDRPGHFLPNRRAAKAGLNRAILDVGFYEFKRQLGYKTEWYGSTMQMVHRYAATSKTCSGCGWVKPKLTLAERTFNCTQCGLAMDRDHNAAVNIRALALEGAAPMEREQPAPVGAAEKRHRDPVSHRRRPKSLAPCESTRPVRDLSPPATQEETA

SEQ ID NO: 3633 - protein, 568 aa, unidentified
  REGION 1..568: note = Table 20
MNALTPTQAQLLDRHAGTARQAWNWATARWLDWQASIEHTVWAQAAHAVGLDHATTTTRLGDALLAARALLRGHEPEQRAWQSTAYTTARATHGHHATFEDAYTLAHLYRLTAAQPHDPTSPDGLERLHWWAAQGTSSGLPRTQQHGVSTFAYQTALADFAKTAQAYWARPRYSPRTGRRLGAPRFKRRGEHDAFAIMNLTTTASGPWKCILDGHRLLVPNLGSLRLTRNTRELRRLIQRGGRPTSVRFTRTGGRWHLAVNVSFEATNPAVLPPPRPNRVQIAGGAVGVDLGITHLATLSTGTHIPNPRHLTAAAARLENLQQRRDRQHRAASPTCFTPDGTHKRGRCTWGRADGAPLSRRARTTQAQITRLHALLATQRASTLHQLTKHLATRHERVAIENLNPASMTRRPYPKPDPAQPGAYLPNQRRAKAGLNRALLDAGFGEFRRQLTYKTTRYGSTLTLVPPAGTSQTCHHCGHRAPQNRETQADFVCVSCGHVANADINAACNIRDHHVAAPTESQHPAGAGAATHHPPVAVAEQTPPGVNETRKGSPVQHTRTADPARVPA

SEQ ID NO: 3634 - protein, 759 aa, unidentified
  REGION 1..759: note = Table 20
MAVLVVGALCCADHMRPSSDRVGRWRTVRLTLDPTRRQIKVMEMYCLLDRRAYERALPDGPCPNGDSSHASVSRQPDVAAVLASIEPPSTPGDLETKWAVVSSAHHYAAAVSGRRALRVPPRSARRPAPRKRPQTSTRTMFGLYERGGRPHFEIQSYRRVRIGPLASIRIHNSAKGLAAELKDPAVRLVMTTVHRKAHRWYASILIEDSRPLPAPTARQKRNGPVGVDLGVLHLATLSTGETIPNPKVFERGRKQVAKASQAVARSAEGSRRHQKSVERLHRRHHEIAEHRKTVLHTITRRLATSWSHIAIEDLNVRGMTTSARGTIENPGRNIKAKSGLNRALRDVSPWKFREQISYKSGWYGSELVICSRWFPSSKRCSQCGTIRRALPLTQRIFRCATCQLTIDRDLNAAVNLASRVGVAWGTWETENARKESIITNTAGVSHDAASTGRPRADSSATLDEQSSSHPTRSNRQGGPKTLRGPGPLTSRKQPDWTRYHTQWLLNCLALAAQQPPTTRARWEAVTQSLAENSQRSGNVEHGMPVVAVGSRALAIGAQYLCESVIQRCLLQLSAISPDPPIALVRRGRGLGADRWALLPVTSPTEIATGIKPMHPAWHIVGPAHMPTYELVQKHGPTSPVEIISAATHIGKSAAYNSFNVLQQWGLITRRPRYIALGPTTLDDILDQHDHAAAKDAMLDRHRRQRAGWRKTLNLIEYARTSHDIAELAPDSPQLTAGDSEDEQQYRIAVMAGPPPPEAP

SEQ ID NO: 3635 - protein, 537 aa, unidentified
  REGION 1..537: note = Table 20
MTSTTLAPEEPLMVFRGARFRLDPTGEQQGILSQQAGAARVAYNMMCTLNKDILEARSQLYSTLIKDGKTKDKAKKELKAAAKEDPSLAIVWARDFDKNYITPERNRHKHAAQRIAAGENPVDVWNPDEERFNEPWLHTANRRVLRSGQKQYEQALDNFFKSQNGSRAGQKMGKPRFKTKIRSTDSFTIDAVDVSSSTTLIRDIGPKDHARYKTGEASTGIIADYRHVRLSHLGTFRVFGSTKALVRQLDRGGRIKSCTVSRSADRWYVSFLVELPIEIARSTPTKKQYKAGAVGIDLGVKSLAALSTGEIIPNPRFLRTADKKIKKLQRKIARCQKGSKNSIRLKRRLARCHHELALQRAGYLNELTSMLASSFSAIALEDLNVAGMTSSARGTVENPGKNVKQKAGLNRSILDISPGRIRTLLEYKCTDRGVELQVIDRFFPSSQLCSSCGSKTTIPLAQRIYHCDVCGGVIDRDVNAAINIVYEAKRLVEQKCSEHSAPEGAEDKRPWSVHLPSTQYVDGLYTRKRQGPSGHSS

SEQ ID NO: 3636 - protein, 547 aa, unidentified
  REGION 1..547: note = Table 20
MPTRTAMPTSPQPQHRAFKVRLDPNAEQAQRLAQAAGAARVAYNMLIAHNRDAFEAGQARKAQLIEAGVSPEDAAQQLKRLRADEPSLRVLGYMAFASAHLTPEIQRHRAAAAALAGGAQPAAVWPETERYAQPWLHTVPRRVLVSGLQNAGRAFDNWFASMTGARAGARVGRPRFKKKGASRDSFTIPAPEVIGARGTAYKRGEARRGTIQDYRHLRLGFLGVLRTHESTKRLVRACRAGAVIRSFTVSRAADRWYASVLVEMPQTDPPTPTRRQRENGAVGVDVGVKALAALSTGEIVTNPRHGAKGAKRLAGLQRKLARTQKGSQRRQRLLRQIARQHHLVSLRREGQVHELTKRLATTFEVVAIEDLNVSGMTRSARGTQENPGTNVAAKSGLNRSILDASLARLRQQLGYKTRWYAAQLRTIDRYAPSSKRCSNCGAVKTKLSLSERVFDCEHCGLALDRDVNAAINIRTLATGPDGPTDLGQLAPGTGESLNGRGEPSLPSPTGEGSPGRAHGSVKTAAETLRPPQASDRLLIHHTRKRRE

SEQ ID NO: 3637 - protein, 520 aa, unidentified
  REGION 1..520: note = Table 20
MSTSIESTGTSPGTVERHVAFKFCLDPTQAQLVTLTRNGGASRFAYNMLVGYNAEVMRTRNEYWAKRREEGATDDEIKAELKTLAKEDSKFKTLGYMAFGKMLTAEVARHRACAKAIEEGTPVEEVWGEDERSKEPWLHTIVRRVLVSGLMSADKALKNFFDSRTGKRAGNKMGAPKFKSRASNSDSYTIPAPEVMGGYGTAYLRGEPAYKRVKENMKRRGEKGAPIIGDYRHVRLAHLGTFRIHGNTRRMMRTIRKGGAIKSFTVSQVADRWYVSFLIATNVPTPKSTRKQKNAGAVGVDLGVKYMAALSDTEAPKRFSPDSGATFTGGTKPTIENPRWLKHAEKRIAKLQQKIARQVKGSNRRKVTVRKLAKTHHITSLRRETGLHQLSKNLTTRYTVIGIEDLNVAGMTASASGTIENPGKNVAQKAGLNRAVLDVAFGTFRNQLEYKAAWYGSAVQVIDRYYPSSQTCSNCGERPDARLTLGDRVYKCGHCHAVIDRDLNAAINIRREAERLYAEV

SEQ ID NO: 3638 - protein, 350 aa, unidentified
  REGION 1..350: note = Table 20
MKNYYASKTGRRKGRAMGKPQRKTHRSRKSVTIHPDSRMGPKGCPPPRGQPQITGYKHLYLANLFSHASKPDKKDRILRVRVHGSTRRLVKALQNHPDAKISNFTISQKGGYWYVAVMVKSAQRQPSLTRRQKQADTLGIDIGIHNYLSLSDGSTVIQLPPLLQRNIKRSKNLRKKLARSQKGSNRRRKLIATIKRVDHELKLQRDGFVHQITAELARNYALIGIEDLNVKGMTRSARGTVDAPGTNVRAKSSLNRRMLEGIPGEFRRQLEYKTKRTGAALEVIDRFYPSSKTCSRCGWKNENLSLSNRQFTCLECGLSLGRDHNAALNIEAEAERKHLKDTKSPKPSHD

SEQ ID NO: 3639 - protein, 506 aa, unidentified
  REGION 1..506: note = Table 20
MTIQAVPATTVIRRAYRLTLDPTPRQAQMLSHWAGAARAMYNHSISAKQESHKRWLQEVAFATYGPVALTEEQARKTIRIPIPSTPDFNAWLTGTRNFHREAAGKGLPVPGLRDDGREHEPWLHAVNRSALVGGLRNADRAWNNWMASFKGIRAGRRVGYPRFKKRGVARDSFTITHDRKSPGIRLATTRRLRIPTFGEIRFHDHAKHLQRKIRRGTVEITSVTVSRHGHRWYASLAVEETIPVPRLSKRKRTAGIIGVDLGVHTLAALSNGDLIANPKIKASHARKLARLQKRLARSQKGSRTWKQLVHKIGRLAHLEARQREGYAHDLANRLVKTWAGIGIEDLNVAGMTRSARGTIEKPGRNVHAKAGLNRSILDVAPAQIRRILEYKTAWSGTCLVVIGRFEPTSKKCSACGVEKDKLPRKERIFHCDACGLTLDRDINAAINIAALADVATAELPVSIRRGIVHGRHETPVEPPRANPFPTRAGNGRRRNVDRPARVIFAQ

SEQ ID NO: 3640 - protein, 510 aa, unidentified
  REGION 1..510: note = Table 20
MVETTIRSFRFTLDPTADQEMNLTRHAGAARWAYNWALGHKIAAYDLRRAEISALIESGHTEASAKKATTVRIPSKAAIQKHLNRIKGDSRRHLPEPQAYGPHPPCPWWHEVSTHAFQSAMTDCDTAWDNWVKSVAGKRAGPRVGMPRFKRKGRARDSFRLYGIGLRLDGYRRISLPRIGSVRLHDSARRLGRLITRGIATIKNVTVTRRGSRWYACVLTEVTDASPPTRARRAGGTVGVDLGVRWLITLSRPLDPAVPDSDTTPNPRWIERDARRLRKAHRRFSRTVRGSQRRRRAARALGAIHARVAERRAGHLHRLTKRITTTFDVIGLERFDLVRASASARGTVEQPGTNVGVKSRFNRLLRDAALGETRRQIDYKARRYGSTVVHLAPGTPTNAICSSCAWENPPPRLGTDRFACGKCGLRVRRAVNSARNIERLTHRSVHVAPDTEETRNARGVVSSDASPAPNATTGKREGPQGSPRRSNPSVTGSTPVESETATSAGIPITR

SEQ ID NO: 3641 - protein, 603 aa, unidentified
  REGION 1..603: note = Table 20
MSVQVVERAFRFCLDVSRAEIRTLERHCGAARWAFNFAHAQFLAQHTVFVQRKQSAAEGLSGRGGEGMLSDLTKAQRREVYRQAVAMVGAENRVLCAELKVVDQHRSRVTHKGKAFLEPGDVPAVGASRLELELYARRVELAALQQANPAEYTVAKRGELTRVRPVLLEMKQELAARGAYRPTSFDIQSIWRARRDLPRDAGGSPWWPEVAIGAFICGFDRAARAWQSWMDSAADRRAGARVGLPRYKRKGQCLDSFTLMNPRRAVIHLEDSRHLRLTGIGTLRLHQPARRLRRLLRAGVADLTSVTVNRSGDRWYVNIQTKVHQIIPAKPTARQRAAGLVAVDLGSNPLAVLSAPLDVCGGGTEIAARKPLIVQEKRLAHLQRAFTRTVKGSKRRHKAARRLGRVHAQIARQRSGFLHTVSKQLATRCAHIAIEDLDLMRLTASARGTVQEPGRNVKVTARFNRHLLDAGLAELRRQLAYKTTWYGSSLIVLDRGEATATKCSRCGERNPSSKVGSKRFTCPHCGLDVNRRVNAARSIYKAACQAASASVACGERDTQNALRDERPPRVGDGAGPSSLKRPPSPEATGGRPSSRVDRVTPAE

SEQ ID NO: 3642 - protein, 628 aa, unidentified
  REGION 1..628: note = Table 20
MAKKTASYRAWAQRRNALVDAGVGKAEASKRLRAQAALRGREAAAWEYHRKVLVSWTRRNPKLVREPANADPEVLARLRELREDVERGSLEHRRLLAEARAWCDAAKGGQFAAGDRFPSAMDICALWRDERDVVCSGEDGPWHGEVSSYAFSGGFDRAERAWKNWTDSLAGLRAGRAVGFPRFKKKGRSTDSFMLCHDVNHPAIRIEQHQGAGAYHYLQLPKIGRVRTWDDARRLAKLVKSGRAVISSVTISRAADRWYASVVCRIEQDVPVAFKHTAADGTSALYLSHSEAITAAAACAKQALAAQAEQHKRRGDQQAAAKLAQITHALAPCSPGTCADAAERARARQLAQVHGGPVQRVGKNTPTQRVGGLVGVDLGSKHLATLTARLDQSDPGSMTVAAPKSLNTMLGKLARAQQVLSRKMKSSGRRQKAARRVARIHHKVALHRAGALHDVSKRLTTGFTQVAIENLNLVQLTASSKGTAENPGKNVKVKAAFNRHLLDSALGELRRQLTYKSLWYGSELLVLDKGSAPNQTCGQCGERNPNSPPLHARFTCFTCGHTADRTHNSASAIRRLAREQIAAVASDRGDTQNARRASVRPDNPRETGHGAMKREDPGHAAGRGPSSG

SEQ ID NO: 3643 - protein, 644 aa, unidentified
  REGION 1..644: note = Table 20
MDGTGYARTDRIPPLTCQHCARIDHCPPRTLWNGAYRASLVERVFSDSASVFVRGNAVPQIEVLRAFRFALDPSDAERAELARYAGACRWAYNYALGKMTESYQAWAARRSVYLDAGLSEVEAKARIKADGAELTDRIKVWDHHRKSLMNNVIGKQAPAPAQPSTGQEELERRLAAVRADAAGAGRERELLAEARAMVNALKAEAFSAGFRTPTAFDTSALWRMDRDRPKEEGGSPWWSEVNGFCFTSGFDRAGVAWRYWQDSLAGRRAGPRTGYPRFKKKGRAADSFTLFHDVKRPIIRLDGYRRLVMPGLGSIRIHDSGKRLARLVTRGQAVIQSVTVTRGAHRWYASVLAKVKQDVPVLWEHVDDDGIRVPYMTRAQAEKAASGSGRVEQVGGPTVRQRAGGLVGVDLGSRYLAALSSPLDPADPTSALVQHPRLLADSLTKVAKAQRTLARAQQGSHRRAKAAARVAHLHHQIRVGRASFLHGVSKKLATRFTHVAIEDLALAALTASARGTAEQPGKDVKVEARFNRHLLDAALGILRGQLEYKTAWYGSQLVVLDKNEPVASTCAKCKERNPSSDPSRSRFHCLSCGAVVHRHENSTANIVYAARRQLTTVASDSGETLNARRDPASPTSARTPGRGR

SEQ ID NO: 3644 - protein, 535 aa, unidentified
  REGION 1..535: note = Table 20
MPALEVTRSFRFALDPTEAQRESFLKSAGACRWAYNYALEKKTRSHQAWVSRRDSLIAKGMSRPQWKAQLRRETADLKASCAAWDHHRRALIRMARSAEPEVAVAPQEPADLVARLAREREEARPGGSGEEYARALARARRMVARHKEELFARGDQIPNQHDMAAMWRTERDLPKEQGGTPWWNEVNVYCFTSGFDRAQAAWNNWMTSASGERGGRRVGYPRFKKKGGCLDSFTLYHDVQKPRIRLDGYRHLIIPTTGRIRIHGSAKRLARLVALGEARVQSVTVTRRAHRWYASVSCKITQRFPAEPTLRQRAGGTVGVDLGSRYLAVLSNGPGTAGGRESVIPHPQFLLRDLPRINCINRRMRRMQPGSREYRRLSARAARRHHLVALRRAGTLHDITKRLSRGYACIAVEDFDLVSLVTSAKGSRSRPGTKVKVKSLFNRRLLDASIGEFRRQLAYKCPQYGSRLIKIDRGEPVATTCSRCGDRNPNAKPSQEKFTCPSCRYTADRHANAAACIYMAALRKMSAVASGSGET

SEQ ID NO: 3645 - protein, 606 aa, unidentified
  REGION 1..606: note = Table 20
MAQAEAPRRLRAYKFALDPTEAQLREFEQHAGSARWAYNHANAILSRYSDTLRNRWNAWIAQHHGLSREQLYALPDRERTAIQAAARAAVKAENAQLAAELRIIDDHRKRVTHKGKPSVEPGEQPAEDAPERAYQLWRERVELARLHAEDPQAYRAERKRILDEIRPLVNATKRKLIEQGAYRPTAMDISTLWREIRDLPPDEGGSPWWPEVSIYAFTSGFAHAETAWKNYLESLAGRRAGRPVGKPRFKKKRRSRRSFTLYGSVKLVTYRRIQVPSIGSVRLHGSAKRLHRALERRGGIIKSITISQGGHRWYASVLVDELDITPGRETQRGPSRRQRDRGAVGVDLGVHHLVALSDPNEKTLDNPRHLRKARKRLLKAQRAMSRRRGPDKRTGQEPSRRWVKARNRVARLHHELAVRRAGHLHEITKRLATSYELVAIEDLNVAGMTRSARGTIDQPGRGVRAKAGLNRSILDTSPAEFRRQLQYKASWYGATVAVIDRWAPTSRTCSSCGAVKAKLSLAERTFFCEHCGMELDRDINAARNILAFAQSAYPGEGKALNACGGSVSPGSQSVVQAGADEAGRPARKPRRSSRGSDPPATPTTRA

SEQ ID NO: 3646 - protein, 528 aa, unidentified
  REGION 1..528: note = Table 20
MKEVRAKAAPAPRVTVVRTFKFRLDPTPSQEERFAQHAGAARVAFNFAVTMMDLATDRWHALRAGLMEQGMTREEATEALRGRSPVPRKGDVQRAFNRCKGSMKPGSERAGEFPWWDQPGREVGTYAFQDAFANAERAYANYIASMSGRRRGSGMRRPRLKKKGRSVDSFGARGQVSLVGYRAVKIPVIGPVRTLDPRLAKKMTRLMARGSGRISGATISRGGKHWYVALTVPLDPAAVPVPGPTRAASQRGSAGAVGVDLGVSLLAATSDDRDPQQTFDRLAPARASHTRMLRAQRSLARTKTGSRRRRKAARRVGALHHTISLQRATAQHALTAHLTSSYALIGIEDLRVANMTRRVAPTPDPNDPGRFLKNGQRSKSGLNRSILDVGWGEIRRQLTYKAERRGITLVAVPAMNTSRRCNECGHVAAENRKSQAVFACVACGHTRNADVNAAHNILTAALAIRAPLGHGGPPPLTEGNGDTRDHRNAAMRMSEHAEGGAPEPGKPGRGDLLLTREACEPLHATVRE

SEQ ID NO: 3647 - protein, 518 aa, unidentified
  REGION 1..518: note = Table 20
MDENTTTVVVRETLDPTADQRAILQRYADASRCSFNYALGLKHGTQQLWAHGRDRLIAQGQTPAEAARNAPKVDVPSQFAVQKIFLAQRDQPLPGPLLPGQEPRLLFPWWKGVNAIVCQQAFRDADTAFNNWKSSGRRKGAPVGYPRFKRRGRCRDSFRMFAVRLVEQDLRHVRIGGGGGQPAFSVRLHRPARRLARLLARGGVAKSVTISREGHRWVAAFNVRVPVGPVPRPSRRQREAGTVGVDLGVKVFAATSDPVIINDHKIQLFENPRHLENTRRQLRKWQRRMARRHVRGLRSHEQSQGWKEARDQVARLHALVAARRASSQHLVTKRLVTQYAHVALEDLRVKNMTASARGTAESPGRNVRAKAGLNRAILDVGFGEIRRQIEYKALLYGAQVTVVDPAYTSQTCNRCGHVDAKSRRTRDQFTCTRCGHATHADIGAAINIKARAELTSESAAPGLANHDQGVHCGAPANQTRPKARRYAPPAKHGMPYSGEVSGKVPKGRASHSPVSQPG

SEQ ID NO: 3648 - protein, 510 aa, unidentified
  REGION 1..510: note = Table 20
MPVEQRLVQQAYVFALDATPRQQRAFASHAGGARFAYNWGLQRIAEALDARQAEKTAGLKPTTRVPGHFDLCKAWTQWKDTTEWTDRNTGEVTVGVPWVARNFVGTYQAALRDAAAAWKRFFDSRAGRLAGRRVGRPRFKKKGRSRASFQVHGAQLQVVDAHHVKLPKVGVVKTHESTRKLLRRIRKGDTTCPTCKATGQVPGKDTPKKCPACKGSGRVPVARLVRGTVSQGSDGRWSIALTVEVVREIRTGPSDRQRAGGTIGVDLGVRSLVVTSAGEQFEHPRHLEAALDRLAAAQRALARCQPGSRRRAKAAARVARLHARVANLRRDATHKLTSRLVHSHERIGVEGWDVQQTAQRGSADVPKRVRRDRNRVLADANLGELRWQLQSKAAWYGCQVQVADRHAATGRTCSACGQVRVKPVPPFEEQFTCPACGWCGDRRWNTARVLAAVARGEHQQYDDASSGGESLNARGGDVRPAALRRGGRSSLKREARARPPGRGETGIPGP

SEQ ID NO: 3649 - protein, 576 aa, unidentified
  REGION 1..576: note = Table 20
MHTTTQAARVAGLTGWAQLPGKPDKNGACSGEDTKPGRLVDAGGGFETQRAAVESVSVLFELFDGIAVDYLDSGVVGEPLPSGWMVTAAKFEVECPTDRTRCSLVNSHFGGRRFAYNWGLARVKADIDARKHDPAHESVAWNLAALRKAWNVEKGAIAPWWEANSKETYSSGLDDLVTALGNWSASKKGLRKGRTVGFPRFRSRSRDSGRVRFTTGTMRLEPDRRGITLPVLGTLRSKENTRRVQRHTASGRARILNMTMSEQWGRLFVSVNYALRTPETASTPAQPTTRAGVDVGIRMHKNALGDGTVVHRRTLATVVVRDLVTSEETVTEYTAPAALHAVLGGIRRANRELSRRIPGSRGYLAAKTKLTRSSRRAVNVRQESVHQLTSWLTATYGEIVVEDLDLASMKKGMGRRAFRRSVSDAGLGAIRPQLAYKANRTGAVVTVADRWFPSSQLHRGHALPDGTYCRLVGKGRIDKHLTCPSTGEVVDRDHNAGGNLCDWPDQASAVQLEPRPRTSALPPAVAGTSAQPSRKAKLGRTRKTTPQGKAASSEVRTERRSPTQGTAARNPARGAA

SEQ ID NO: 3650 - protein, 363 aa, unidentified
  REGION 1..363: note = Table 20
MTTISVTGDIAITQHDQLLCRLHDQLGWWATKDRNRVRFTTGTMGFEDDHRTIVLPMIGALRSMENTRRIQRHLAKNNARLLKRTLSQRWGRLFVSCQLAIKTSVVTPPSATMSKKDPRAGVDLGLRSLATIADSNGSMTAIPNPAPLRATMNERRRVGRNLIRRIPGSHGHRQAKAKLVKLDRKAVYVRRESIHQLTCYLVDNYSEVKIEDLNIAAMGRSMGRRALRRSVSDAGLGAFKPTLTYKAERAGVKVVVVDRFFPSSQIHHNCTGRLTGAKLAKRLICDTCHVEVDRDENASLNIRDWSVISCGPVGSSALPVPRPFGTGGSCDDGMTHHRPRCSCDASRCPQRRHRQRTPGPVHL

SEQ ID NO: 3651 - protein, 311 aa, unidentified
  REGION 1..311: note = Table 20
MWNPARRHLPLPVIGTVRTHENTRRIERLIKAGRARVLAISVRRNGTRLDASVRVLVQRPQQPKVVHPGSRVGVDVGVRRLATVATADGTAIEQVENPRPLGAALRELRHVCRARSRCTKGSRRYRERTTQISRLHRRVNDVRTHHLHVLTTRLAQTHGRIVVEGLDATEMLRQKGLPGARARRRGLSDAALGTPRRHLSYKTVWYGSALVVADRWFPSSKTCHACRHVQDIGWGEQWQCDRCSVVHQRDDCAAINLARYEETSSVVGPVGAAVKRGADRKTGPRPAGGCEARKGGSRMAAEKTRDGVQVA

SEQ ID NO: 3652 - protein, 661 aa, unidentified
  REGION 1..661: note = Table 20
  REGION 186..191: note = misc_feature - Xaa can be any naturally occurring amino acid
MNLAVWAERNGVARVTAYRWFHAGLLPVPARKAGRLILVDDQPADRSRRARTAVYARVSSADQKPDLDRQVARVTAWATTEQIAVDKVVTEVGSALNGHRRKFLALLRDPSVKRIVVEHRDRFCRFGSEYVEAALAAQGRELVVVDSAEVDDDLVRDMTEILTSMCARLYGKRAAQNRAKRALAAXXXXXXGARRRRVGGCLMAKFEIPEGWMVQAFRFTLDPTAEQARALARHFGARRKAYNWTVATLKADIDAWQATGIQTAKPSLRVLRKRWNTVKNDVCVNIETGVVWWPECSKEAYADGIDGAVDAYWNWQNSRSGKRDGKRMGFPRFKKKGRDPDRVTFTTGAMRVEPDRSHLTLPVIGTVRTHENTRRVERLIAKGRSRVLAITVRRNGTRIDASVRVLVQRPQQPKVTDPGSRVGVDVGVRRLATVATADGAVLERVPNPRPLDAALNELRHVCRARSRCTKGSRRYRERTTEISRLHRRVNDVRTHHLHCLTTHLAKTHGRIVVEGLDAAGMLRQQGLSGARARRRGLSDAALGTPRRHLSYKTGWYGSQLVVADRWFPSSKTCHVCGHVQEIGWAEHWQCDSCSASHQRDDCAAINLARYEDTSSVVGPVGAAVKRGADRKTRPGRAGGREARKGSSRKAAEQPRDGVQVA

SEQ ID NO: 3653 - protein, 314 aa, unidentified
  REGION 1..314: note = Table 20
MSDKEISHPKSYPPRRPTSARKCLCWVATRNPWGLVPERNDWPMWADAIEAGIHATVRGDCPEYTTTVVTASPDRAASAHAEAESRRSLGTGLRGKEIVRENGALPAPPGAEHDEDAEAAERLRHFSTVRDKTVLAPEWYCLDYAAGLRLTPSLQMAAERQSGASAVDSSDNSKGLPGARTRRRGLSDAALGTPRRHLSYKTAWYGSQLVVADRWFPSSKTCHACGHVQDIGWAEYWTCDRAGSGCGATHQRDDCAAINLACYEEPDSVVSPVGAAVKRGADRKTGPRPAGGREARKGPGHPAGKQPRDRVRVA

SEQ ID NO: 3654 - protein, 596 aa, unidentified
  VARIANT 502: note = misc_feature - Xaa can be any naturally occurring amino acid
  REGION 1..596: note = Table 20
MSFVIATPEMLTTAATDLAKIGSTITAANTAAAAVAKVLPASADEVSVAVAALFGTHAQEYQTVSAQVATFHDRFVQTLSATASSYVAAEAVNVEQSLLAAVNAPTQALFGRPLIGNGADGSPGTGQAGGPGGILYGNGGNGGSGAPGQRGGAGGAAGLIGNGGNGGAGGVGTTGGAGGHGGAGGWLYGNGGAGGFGGAGAVGGNGGAGGTAGLFGVGGAGGAGGNGIAGVTGTSASTPGGSGTAGGAGGIGGNGGAGGAGGVLMGNGGNGGAGGEGGPGGAGGAGASGAHATNLGADGQAGGNGGNGGAGGTGGVGGPGGGHGLLGLGGSHGAGGAGGSGGDGGAPGDGGNGATGTWGHNLGAGGTGGNGGNPGAGGAGGAGGASVGGSAHGANGAPGTTSTSGGNGGDGGKGADAISSGQTGANGGRGGDGGAGGAGGKGGRGGTGGPGGAGPAGTTGSQGAGGNGGSGGTGGDPGDGGNGANGSVFTNNGIGGNGGNGXPSSKTCHACRHVQDIGWDEKWQCDGCSITHQRDDNAAINLARYEEPPSVVGPVGAAVKRGADRKTGPGPAGGREARKGTGHPAGEQPRDGVLVA

SEQ ID NO: 3655 - protein, 436 aa, unidentified
  REGION 1..436: note = Table 20
MSGAEPAGNGKKKRRGFEARPGFHVVGHRLALDPNASALQALASHCGAARVAYNWAVRHVLASWSQRAAEETYGVPEAERVAWRSWSLPSLRKAFNEAKHTDPFLREWWAQNSKEAYNTGLANAAAAFDNYAKSRRGERKGARMGRPRFKSKRKARPACKFTTGTIRLDDRRHIVLPRLGGSASTGRPAPRGRDRRRREADSVGDGAVRAGPLVRGPADRGTPHHRSCHPPGTAVGIDLGVKTLLVMADSAGEVREVANPKHYDQALTQLWKASRTVSRRRGPNRRTGQAPSRRWEKANAVRNRVHHRVANLRENHLHQATARIPAEYGTVVVEDLNVKGMVRNRRLSRRISDAAFGELRRQLTYKTQRHGGRLVVADRWMPSSKTCSRCGVVKAKLPLGVRVFECDACGLVLDRTRTQATTWPPSRRPTVKRVPE

SEQ ID NO: 3656 - protein, 406 aa, unidentified
  REGION 1..406: note = Table 20
VSWSANSLGTRWNSVKHEVAPWWREVSMHAFRSGVVDAAAALKNWSESRSGKRKGPKIGFPKFKKRDRTASSVSFVEINHQLSWLHPDRHHIRLMLPQRSPDQQVHRRTSQLAWLHSVESIGAFYRLVESGEATIQKLTIARRGGRWQASFLVRYKVGPAPKPVKHSGAVVGLDSGVKYLVTTSVPVPGLSDADGHVPNPKVLDTNLRRLRRLDRAVARTQRGSKNHRRLIARRVRLHGRIAKTRAVHLHPITTSLAGAFDVVAVEDLNVKGMANRKRRLGRRLADASLGELRRQLAYKTTDYGHRLVAVDRFFPSSKTCSACGKAKATLPLGERVFRCDHCGFTADRDVNAARTIDHEARRLLDQDLHDQQDAEAHVAGLRPETKNADRRRRKTSEAQADLAAVA

SEQ ID NO: 3657 - protein, 433 aa, unidentified
  REGION 1..433: note = Table 20
MADKTPKEVNELAYRGVEFALSPNATQRNLLESNAGAARFAYNWALDEIKGEYALWENDKSRKMGCTHYELRKRFNHVKDDIAPWWHDVSKEAFSYGCACAATAWKNFMDSKRGGRHGRRVGFPRYKSRRQEHNHRYAITTGIDHCVADAHHIKIPRIGRVRVMENIYKRITSQVIHRMNIRLQGGRWYVVLLIEVPENAMPSQSRKHVGIDLGVKNLATFSDGTVVRGLRPYRNAMRKLARAQRSLSRKTRGSKRYERQKRRVNRIYARVRGLRRNQLDQLTTNISERYSLVAIEDLNVSGMARNHRLARAISDEGFGVFRHMLEYKCRDRGVALVVADRWFPSSRTCSVCGCVNAELALSDRTYVCPECGLTIDRDLNAAMNLDRYGMSKVDSRAEDTLNARGGNVSRNCDNSCADPNETCTNESVESVGA

SEQ ID NO: 3658 - protein, 421 aa, unidentified
  REGION 1..421: note = Table 20
MTLKGIKVRLDPTPSQERMLLSHAGAARFAYNFMLGMVKAAVAGRVGRFGWSKAQLRRVWNSWKADVAPWSAGNSKEAYSYGVECLANALKNWSDSKHGKREGPKMGFPKCRVRSKHMKFAYTTGSFGLINGDPKALKLPRIGRVHCFEDMGKRVGDGRVLRMTVSCSAGCWYASLTVEYPDPVAPAKPSGGTVGIDVGVKILATLSDGTVIDNPKHYKRNERKLRKAGKRLSCRVKGSNRWKKASLAVQKVQARTAAQRHDTINRATTMIAQTYGTTVIEDLNVAGMKRNRHLAKAVSDAGFGEFRRQLAYKCLDSGATLVVADRWYPSSKTCSGCGTVKAKLSLADRVFVCDNLSCGYAREGVDRDWNAAVNLEHYVAPSAAGDAKRARRNRKTTGPRQAGNAGPCETRTKQNAPISVQ

SEQ ID NO: 3659 - protein, 486 aa, unidentified
  REGION 1..486: note = Table 20
MSGENKKRRYHTPPGRMLKGIQVRLDPTPRQMGLLASHAGAARFVYNMAYSHIISQLHGLVRVNGDGKADWSMPALRRWWNEWKHELAPWWAENSKEAYTSGLQALSDAFSNYFKSRNGQRKGERVGWPRRKTKHHSIPKFTYTTGSFGLIDGDMCALRLPRIGRVHCFENLHKLVQPADKILALSVRQKHGKWYATLRVETDQPKPVSTLHGSIGIDLNCGDNILTTSDGLVVANPKYYQKTARKLARAQHCLARKKPGSKRRERQVRKVSRLQEKIACQRSNLRHKITHMLATTYKHIGIEDLNVKGMTRRPQPKENPDNPNHYLPNNAKAKSGLNKSILDVGFGEIRRQLEYKCHTSGAILHVIDRWYPSSKTCSGCGMVKTKLSLNQRTFICDSCGLILPRDLNAAININHIGSTPMLNARGETHETGSLTPVSEPVPSKHPTVYREGNAYRATRIRCKTRSHPSKNKTPGVLVSSQQKQTN

SEQ ID NO: 3660 - protein, 450 aa, unidentified
  REGION 1..450: note = Table 20
MTTAILELTSTSTATVTQAYAYAYAYAFDPTPEQVNLLRSHIGGSRFAYNALLGLVKTNWDENRVRKDAGDEVPKEEYLGTGHFDLLYLWAKHRDELAPWWGENGSSTHNDATQRLSRAFTNWKKGTAKFPTFKKRQPGGSVRFTNTAVRLTDSHHVRVSRVGELKTYESTRKLYRHLERGSGRIMAATITERKGAWTIAFSVQVQRVIPATRPPERIIGIDVGLSTLYTGATPDGNHVLDVKNPHHLVTAEKRLAHAQRVASRRQGPRKGVAPSNRWKLAHVRVQKVHAGVANSRRNLIHETTTLLAKNYDLIVVEDLNVKGMMKNHSLARHISDASWGEFTRQLEYKTKWYGSSLVKAGRFYPSSKTCSQCQTVKAKLSLELRTYHCESCGLTLDRDLNAAINLARQGLAGTNTVTGRGGEVRPSQQTLAGEAHPDEASTETPPEVGA

SEQ ID NO: 3661 - protein, 558 aa, unidentified
  REGION 1..558: note = Table 20
MSRFQVPDGWRQQAYKFCLDDGERADPAEASHLGARRFAFNFGRRLVEDQLHARNTYRVLALRQGASAKDANTWAQTMVPVPWSQAAMRRIWNDTKDLITARDDAEREAAVENIAAREVLEALALRQGARATEARNYADRVIPTVGWWKENSKEAYSSGFEAAATAFKNYFASKSGTRNGTPVGWPKPKARYRGRASVSFTTGAIGIVDRHHVQLPVIGVRRTKEPTDKLRLKLKDKSAKILRATLSQEGGERFVSFNVIVKRKPSMPATCGVSGTDVGIAHLATSSDGHVVENPRAEKQLRQTISRYQRRMDRQHRTNSPACFNADGTHVAGRCLWKVRSKQSLQTQAKLKRAHAKAANMRRDPIHKESHRLASTYSVNVVEDLFASGMMRRGRSKRGSNRAQADSALAELRRQLSYKHAWFAGILLLASRWYPSSKMCSGCKFVHHNLKRSNRAFMCPKCGLVIDRDLNAAYNLQSLAELACVAVLCQLLTGEPVDWSKLPVRPYGWENKDPKKQDTRSSRGCARAGSPRADGGGRKTARSCSAGDRPFDREAVVA

SEQ ID NO: 3662 - protein, 490 aa, unidentified
  REGION 1..490: note = Table 20
MITEPATPKLDKNDPDVVVRSYKFALRPTTSQERKLRQHTGAARFVYNYLISQWRDDILIRAEEKERGVPEDGLTPFTFKLSAYDMRNYWNRTKGECAPWWPEVSKEIGNDAARRAHDSIENWHDSRGGKRKGRRVGFPRFHKRGCHESCTFSTGTIRVNPDRHSVALPRIGTIKTRENTRELQRKIAKGTARITQATISRGFNYWHVSFTMYEKKHIPETHAHSGSVAGVDMGVGDHVIVAATPNGDEIMRRGLPQSVTKDEARVRHLQRKLSRKHGPDKRTKTTPSNRWIRANNQVRKYRNTMANVRRDLAAKTAHGLAKNYETVVIEDLNVQAMMTRGGAHKRGLNRAIAQASFADLRRRITYKTRWNGGTTIVADRWFPSSKTCSECGEVKSKLSLSEREYICHRCGVAVDRDLNAATNLAKLAAPKSGVDFHGTGSSPGMGRGGAGKTSSPSGELAPASEASMARKDLSGRKAGTRQPDHQSQFS

SEQ ID NO: 3663 - protein, 481 aa, unidentified
  REGION 1..481: note = Table 20
MGNESDVSVTPSQTIHRAYVYVLDPTPSQASQFESHCGGARFAYNHMLGLVKSTLEQRDAERTYGIPEDQLTPSMSWSQISLNNTFNARKDVAAPWNRENSSRVYLYAMESLATALKNWADSRKGKRKGRGAGFPNFHNKRSRKSCTFPGANIKMSETRHRISFPVIGSVHTIESTRKLSRLVEQGKATIKRATLSYHRGRWQVALLAEVAAPVRKRKTNPTVVGIDVGVKDWLVAGTADGSEILRVGVPDKIKELDTRRRVLQRRNRNRQAPRKGVAPSKRWLDAQRKIAKLDWKMAAIREDALHKATTELAKRFDIIVIENLNVKGMMSKGGSRKRGLNRGIAQASMATTHHMLTYKSLELIEAGRWFPSSKTCSFCGAVKTKLGLGERTYICDHSACGHTMDRDLNAAVNLAKYGEDMVYKAGSPSASGRGAERKTGDALRGPSSAAGSEASTPLGESETGNGLTPACIVVDSALSCV

SEQ ID NO: 3664 - protein, 487 aa, unidentified
  REGION 1..487: note = Table 20
MGRFEIPEGWVAQAYRFALDPTPAQQRALASHAGGARFAHNHMLALVTAVLDQRAAERSYGLTDADLTPSLGWSLPALRKTWNQRKSVYAPWWGANSKEAYNTGLDSLARGLDAWTTSRNGERVGKAVGFPRFKTARSRRSVRFTTGTLRVEPDRHHVSLPRVGRIKTHESTRKLARRIESESARILSATVSQDSSGRWHCSFQTLVAAKTRPAHASRSQCPVVGVDVGVKADSLLVVATPDGTEVQRIRAPKSLSAAQARLRVLQRKAARQHGPYDPAIRSRRRHSKRWAKTQARIGRSHARAAAIRRDVLHKATTTLAQQHRVVVVETLNATGMRAAGGAYKKGLNRALADAALAEVRRMLTYKAAWYGSAVVAADRFFPSSKTCSGCGGRKPNLTLAERTYVCAQCGVSIDRDRNAAINLARLGQTHMVGEQSSAGSGSVAGRGAIRETGPARAGQAGGREASTRHNPTRVDQTGTAVSQEATA

SEQ ID NO: 3665 - protein, 293 aa, unidentified
  REGION 1..293: note = Table 20
MKLHESSRKLARRLEAGTARIMSATLRRDGGRWHVAFTVQVERRDRAPAPPGSVVGVDVGITHLAVLSTGEVIPNPRHLSKTQNRLRRLGRALSRKTGPDRRSGQRPSQRWQRAAARLGRAHARVSNLRRDGLHKLTTRLAAMHGTVVVEDLNVAGMLANRRLARHIADAGFAEFRRQLAYKTAWNGGRLLVADRWYPSSKTCSGCGAVKTKLALSERTYTCQACGLILDRDANAARNLAALAAKTTAGSGPVAARGADHKTRPSGQVAKKREPGTAPAGKTGTVPPQGQDCL

SEQ ID NO: 3666 - protein, 237 aa, unidentified
  REGION 1..237: note = Table 20
MAFSWGLALVEANLDQRAAERSYDIAERELIPAVDWSAYSLRKAWNAVKWWRENSKETYASGLANLSAALGLARHIERGTARIRSATVRFTRGRWFVAFSVEVRRADRASVLPGAVVGVDLGITNLAVLSQPVAGVSDEHAMVADRFYPSSKMCSSCRAVKTELRLSNRVFYCDSCGHRADRDRNAAANLAALTNNAPSMSSPSCGATKNEPAGKPCKTNIVGSGYRHGNTPEVNVA

SEQ ID NO: 3667 - protein, 470 aa, unidentified
  REGION 1..470: note = Table 20
MVSTDAQVIQQAFRFALDPTAEQEQFLGACVGASRFWFNQGLALVKQRLDKRAAGAEVDVPWSYKSLCVVFRGDHIKDRLAPWRGEVVTGSYQAGLEGLGMALQNYSAARKAGRRVGFPRFRAKGGGHEAVIFQRPRLADSRHVVLDRRLGSLRTKESMRKLARLLDCDPNARVMRSTVQRVNGGWVISFTVQRSAKRRRARRPAAAVGVDVGLARLATLSTGHVAANSRPLQASLRSLRRLQRQLDRQRRANNPGNYHPDGRAKKGCATWVKSQRMVRTERRIATLHQRVANLRREQAHQLTTSLVGEFGVIGVETLAVKNLMGNRRLARHIADVGWGAVLAQLRYKTSWSDGSLLVAADRFYPSSKTCSACGAVKAKLRLTERVFTCDDDACARVQDRDLNAALNLARMAHRHAHAEGISSYVARTGRFTPTARGGQVSLVGLDQHSPVKREASSDASQRGDPLAPAA

SEQ ID NO: 3668 - protein, 466 aa, unidentified
  REGION 1..466: note = Table 20
MTTAAVHQAYRFALDPTRTQRGALAAHCGAARFAFNWGLEQVKASMALCEFERCMFGEVRTAPLRWSLAGLRREWNRDKDRVAPWWAQQSKEAYSSGLAGLVAALQNWRSSRDGKRRGTPVEFPPFRKRGHRDSCRFTTGAIHIDGVRHVTLPRIGRLRTSESTEKLGRKVASGTARILSATLCRGADRWFVSFTCSVERAATRSNGHTDTVGIDLGVHNLAALSGGELVPAPKALSCALRALRRSQRVVARRSRGSRRRQRAQLRVARIHRRVANVRRHHLHVLSTRLAKNPGRLVIEDLNLKGMVRTGRGTVAEPGQRVRARSGQNRLLLDAGFGDFRRLLEYKSVWYGSRLLVADRWFPSSKRCSACGAVRSELARAERVFACAACSFRLDRDLNAARNLDWWAAGHDVAASAVETQNARRGAATIRPHAGEGLEEARTGIVPEPAGLTTGGRDQLGLAYVPC

SEQ ID NO: 3669 - protein, 461 aa, unidentified
  REGION 1..461: note = Table 20
MGEVARPQARLRRYGVSFKLDPTNMQTGWFARSAGSRRWCFNQSVALIAQNHAVWQAQRDAGIDAKERVKPLSAMDLRNALKADRPEWLRELSVWVLEFAAVDAAAASNGFLSGRTRFPKFAKKGKARERWTEWGRDCRLAAGALRLPKIGEIRIAGPDPDQARLRRLIRRGRARITSVTIARHADGSWWASCKIEQQLRAPAVAAAACMPIVGVDRGIRTGAVAATADGAAVLALDSGRYLRQTSRKLARAQRTVSRRTVRGQASSRNRRKAVARVGRLHEKVAQQRKNALHAYSSALIQTHLVLVLETLSTKNLMANSRLARSIADEGWGELGRQLTYKADWAGGTVLLAPRFFPSSKTCSSCGSVKAKLALSERTYTCDRCGLVLDRDLNAAATLAAWGEHQRGTCPCDDSQARDLHPAGRSDEPARHACGGWTSDPAAQAVWSVPPDEAGTSQPLVA

SEQ ID NO: 3670 - protein, 460 aa, unidentified
  REGION 1..460: note = Table 20
MSVVTGTMPVVSHGAVRVRLDVTDVQAGMLLRAAGARRFAWNWAVAKIKANADQWTAEATYGLERADRVRPLSFFTLAKMWTTEKPDVAPWAGEHSTWTFRYALRDAANAHAAFLAGERRFPRFKSRRRDRSRFTVRDGLALKAGWVRLAKYGWVRISSACPQQAKLRRLLRRGNAVLQHITVTKHSDGRWYATVNFTREARTPAAQRTAPAGPVVGVDRGVKTAAVVADANGQMVAELPASRALRDRLRHVRHLQRSVSRAQKGSANRHKAVARLGRAHARAAAVRADALHAFTARLAREHAVVVVETLATKNLMANRALAAAIGDQGWAELARQLQYKTARHGGQLIVADRWFASSKTCSSCGAVKLKLTLAERSYRCDACGLICDRDTNAAANLAAWGEHTLGTCPCVIQAGDRHPGGPSAGASRHACGGWVSGPAVSAGPVLPGEAGTSRPRVSVA

SEQ ID NO: 3671 - protein, 459 aa, unidentified
  REGION 1..459: note = Table 20
MPSATGDDDTPLVSHTGAPLTRPVTFVFTLDPTAEQDQLCFQYAGAFRLVFNHHIARVFANLDQRAAEKSYGITDAELTPALSWSKVSFINHMNAWKNGYAPDSPVTEIADGTVVRGLPWRGAVSADVFETASVNAAQALKNWRDSFRGERKGKKVGRPRFKAKHRTTPAFRLRCKYTEGKTPPVRPAGPRAMRLPKLGEIRVAEHTGKLSRMLETGRFHAYAAAFTYRNGRWQVAVTGMATQHHHLRRSARHRHDRPAGVDLGVKALAVVADSDGLVLHEWTGVKPLQRAQARLKLANQALARTKQGSNGRRKAVRSLGKIHARIRQLRRQLLHDITTTLVTRCSTLVIEDLNVTGMVRNRSLARHISDAALGELRRQLEYKTAWYGARLVVADRWYPSSKTCSRCGHVDDGLTLADRTYRCAACGLELDRDVNAAINLATLALERAPDAPPPQPVAV

SEQ ID NO: 3672 - protein, 308 aa, unidentified
  REGION 1..308: note = Table 20
MAQATIKYDAATKQWTVTVALKWKHDVVPAEPETISPDRILGCDVGITSLVTVATLDGSHHAHHVQPSAVKRLHSRTKTCQRALGLKRLASERAQQRRGLARRVRSKSEARARLKLSRRHARATHIRRHHMHALTNELVKTHDLFGVETLRIGNMMKNHCLAASIARQAWGEFFWQLSYKASWSGKRVISAALYFASTKRCCKCGFIKSEMPLSERTFRCEKCPWTADRDVNAAENLAWYARYGVPVHGKYPVEHDKKPELARAGSRHHGRVTGPMPPDALYGQQGAAMVSSWSTSLARKSEKDGVGI

SEQ ID NO: 3673 - protein, 504 aa, unidentified
  REGION 1..504: note = Table 20
MEPANAIDVGVQLTIKATRAQKEAFSRHAGARRFAYNWCVANNRDLLAKRKQGHNVHIPVTPFDNIHAFNQWKKSHHAGIDKDGKIGLPWRREVHQQVFEEGAKDFSRGLKEALTNWLDRRAKRTRRKVGFPEFHGRATSKPTFRFRNTDHKRFSIVGDAISVPKMGPLRVREPLRRLKRLLRPEVDGSCGRITFATIHEQDGYWRLSLNVRVAKYRVAPAPIEGPSSVGRYDFIGCDLGIKTLVTAANETGGRVGFFGHAEEMGTKNLAIAALQRRLAIKREASKSRARAAGETHRTQGCSEKRLRRRLARRFARQRHVRNNRLHEISRALVSQATGIGVEDLHIRGMLKNHCLARAISSQGWNEFVRQLTYKAARADIPLVTVDRFFPSSKHCSLCFELKASVPLETRIYRCENCGLVCDRDVNAAINIARQARAQWNAAPEVRGQEQTPEPRRLETTFKVSRGRLPANSKEAGRSRDGTARRGRKASAEARKGGVDFVNAP

SEQ ID NO: 3674 - protein, 470 aa, unidentified
  REGION 1..470: note = Table 20
MAAKLPDDWRTASFRFTLEPTPEQRELMARHLGASRFAWNQALRLVKDALDARETDATAEVPWTPFSIINAFNAWKRSSEAGSPDGLPWRDEVHQGVMEEACVDLGRALGAVSGSRNGTRKGARMGFPRFKKRGRTAESCRFRAKNRRSVQVGSGDAARVVKLPRIGVVRVREDTRRVRRLMRRGARPLQATLRRDGRRLVVAITLACPPLHQAHHHQGGGPAVGLDRGLTALVVGATADGAEVVRVENPRHLTRALRQLRRANRVLSRRRRGSRRREQARRRMARLHQRVRDQRNDFTNKLTTDLAKTHGRICVETLGIRGLVRTRLARAISDAAWGEIERQLDYKLAWRSGEMIRAPRWLPSTRACSHCGEVGPALALSKRTFICSGCGHSADRDTDAAAVLAAWADGRITLDAEPHDCRPEVPGDGKRSPAGITGGGAAGVPARPGDRTRSPLAGTAEKAAVSELAA

SEQ ID NO: 3675 - protein, 200 aa, unidentified
  REGION 1..200: note = Table 20
MGIDRGLRHFAVLADETGRELVRISPPRPLRARLQALRRRSRSLSRKARGSRRRHRARCRLGRLHGHIRNLRHHALRTLVLELAQTHGHLVIETLSTAGLMKTRMARSLADVGWTTFERWLTYKVDWHGGRLTKAPRNFPSTRRCSNCRGLGPKLALHQRQFVCGSCDYTADRDTNAAVNLARYGRAVVRSESPGSPGSP

SEQ ID NO: 3676 - protein, 233 aa, unidentified
  REGION 1..233: note = Table 20
MSVAVEAADLHAGHRHPFRPDGDVGGWVGADRGLSAFLVAATGDGVEVDRVVDHPKPLAAALQRQRRLAKAVTRKQRGSKSRGRAVTRLARHHRRVGAVRAHFLHQVSNRLVKTHDRLVLEDLNITGLMANRHLSRAIADAGWGELARQLRYKQAWRGGQVHVVDRWFPSSRRCSRCGTDNLALRLADRVFACGCGLVVDRDVNAAVNLAVRAELDHARVREPETRAPVINAC

SEQ ID NO: 3677 - protein, 441 aa, unidentified
  REGION 1..441: note = Table 20
MARHTTFKFCLDPTTEQQVALARHAGAARFAFNQCLRTVKTSLAARRHNPDVSVPWTGFDLINAFNAWKKSEDAGRVFAVGHDGVTELVVTGLAWRTEVRQQVFEEAAVDCGRALATWSASRSGERKGRRVGFPKFKKKTGSVPSFRLRNNHPRTGKPPIRIGEASPRSVTLPGVGRIAVRGDTRRLRRMIAKQRAKILFATISHRAGRWWVTLNVEAVELHPGHRHARRDTAGHGGWVGVDRGLNTFLVAADDHGHQLARVDDAPRALATQLGKQRRLARALSRKKKGSNNQRQSAARLSRHHHHIANMRRHFLHKVSNELVQTHDRIVIEDLNVAGMLRNRRLARAISDAAWAEFARMLGYKSRWRGGTVVEADRWYPSSQICSVCEDRNTDLTLADRVFTCSNGHQIDRDTNAAVNLARWATLRATPQNPGPPSRRPG

SEQ ID NO: 3678 - protein, 460 aa, unidentified
  REGION 1..460: note = Table 20
MSRMTAFRFTLDPTPAQEALLRTAGGAARLTYNTLLALVKERLDARHAAPESVEVAVPWSSFDLINAANQWKRAALAQQIDPATGQPWHRAIPALVFEEAAVDLARALAAFTASRTGRRPGPRMRFPRFKNKRATSYNFRLRNQKESIVLGTPQHPRTLRLPRLGVLAVREDTRKVRRMLRSVDGQEARARICSVTVRQHRGRWIVVVTVRAADLHPAARHFGTASSPAVTVPTAPALAGELPPASEQTAVWAGVDVGLIDLMVVADQHGDEQTRVPAPKYHRRRLEGLRRRARALSRAQPGSRNHRKARARVARYQACTAAMREHHLHQVSNRLVKSHARLVIEDLNVKGMLANHHLAASVADASFGTLGRMLAYKADWHGTRLVVADRWFPSSKTCSGCGTRKPKLTLSERTFVCSACGLELDRDVNAAANLARYGRDLERLGRDPSPDPGPASSRPG

SEQ ID NO: 3679 - protein, 238 aa, unidentified
  REGION 1..238: note = Table 20
MRNKIHKPKARKDGTRPSERHTIRVGDGRPRSVTLPVIGTIRVHDDTRRLRRMIGKGRARIMFATIPRHGRRWYVTVNCEAADFHPDQHWTPEAETPRVGIDCGITTFAAVADEHGNVHEQVDAPKPLRANLRALRHESKTVSRRRHLSRAVADLGWGEPARQLAYKADWHHAELHVVDRWYPSSKTCSCCGHVVDVLPLSVRAWTCPRCLTVLDRDDNVAVKRGDPVRPQGPAALTR

SEQ ID NO: 3680 - protein, 416 aa, unidentified
  REGION 1..416: note = Table 20
MRAVQAFRFELDPNAAQRIALAKHVGAARFAYNWGLARCLEALENGERLPSAMELHKAWNRWKRENAPWWVEVSKCAPQEAFRDLERAWRNHWEGRAGRPRFKKKKWDADNAFRLTGSIRVTPRHVQLPRIGKVRVKERTDRLTDLLQAKRARILSATISREADRWFVSLTCEVEIPDPDPLPPDAPVVGVDMDLEDFAVLADGNGVERIGFGEVRERIRRLQRKLRREQRRLSRRQRALHPDPRDPHRRLPSRRWLKQLRKVQRLHRRIRNVLNDFLHQTSTRLAKAKRVYVVEDLNLRGMMRRRRRGPRLSRSLAEQAWGTFLRMLKYKSEWYGSKVMVADRFFPSSRTCSACGAVNRSLRLSDRMFRCPQCGLEMDRDENAALNLRKYGLAVGAVGVRCLGTALQPYREFPGK

SEQ ID NO: 3681 - protein, 442 aa, unidentified
  REGION 1..442: note = Table 20
MIKWRGYVLELKLNNTQTALCYNSAGVARFAYNNRLAIISNNYKEFKISQNANKYKIKLGTAIDWYKDLILLKKEKTWISQVSKCCGQESLRDLEQAFKRFFAKKSGYPKFKKRGQRDSFRLCGQTFIASNYAQLPILGKIRLKEKNYPIHEGKIKLSQATVSRQADRWFVSFFIKEDIETPELSQLEDISINDILGVDLGIKELAITSEGNTFKNPKAYKSHLKKLQRYQRMVSRRIKGSNNRKKAITRLSRVHKRVADIRNDTVHKLTSSLVKAKPKAIVIETLKPKNMSKNHKLASSILDSSFGKIRDTLKYKCAWARIHLIMAPTFYASSRYCSVCGHKHNELKLSDREWTCSNCGVHHDRDVNAAKNLQYYALWLMDKHSPSGKYITSLARGESSVSSTQSYACGDERLQFLTEQCSSLKQEFKLQSKYIKEFNESV

SEQ ID NO: 3682 - protein, 445 aa, unidentified
  REGION 1..445: note = Table 20
MKITRGYKTELDPTVKQQILLSQCAGVARYAYNYGLARKKEVYATTGKRISAIDLQKELTAHKHTDLPWLKKVSKWIYQNALRDLDQAFDSFFRRLGERKAGKKHQSLGFPTFKKKSEGIGSFRLDKPIYVFEDSIQLPKLGTIRLKEHSYIPTSEVKVLSATISERAGRWYVAVLVEEHVPEPVSALGAPLGVDLGITSLAVCSDGRPPIKSPKALNASLKCLKRAQRHLSRCKKGSNNREKARHRVAKLHARIANIREDALHKATSSIAHAPLTKEERSTLQTSLTSLLPEAKTKPEQKKVKKQVKKVLHRATEANAPRRPQVICLEDLNVEGMKHNRKLARAISDVGMGEFRRQMKYKSAWNGEHLIFADRFFPSSKQCHACGWKWEDMQLSDRIFLCQNPACSLHQVPQDRDSNASQNLEKLAKEESSALKNIVNGELHRT

SEQ ID NO: 3683 - protein, 403 aa, unidentified
  REGION 1..403: note = Table 20
MIAYKTELDPNNKQTTALLQHVGAARWAYNWGLDQIKQAAEAGEKWPSAIDLHKRLNAIKGTDELPWAYEVSKCAFQESLRNLEGAIKNWRASRNRERKGPQVAFPRYKSRKNGVGTCRFTGSITILDGFIQLPRIGVLRLKEHGYLPVGVKVSQATISEQAGRWFVSVTVEGDRKRQIETTGEVLGIDVGIKTLATCSDGDTFANPKALAAKSKRLRRWQRKLARRGKGSKNRAKAKAQVAKLHKKVADVRRDAHNKTARSIVDKRPSVIVIEDLNVKGMVKNRRLARALSDAALGNLGRIIHYMALDDGIEVRKAGRFFASSRLCSDCGWKNEGLTLSDRTFVCQGCGMVKDRDWNAAINLKNTGSSSEIHDCGDHVRPTSLAMIDEAVTLSQMSAVGTFV

SEQ ID NO: 3684 - protein, 401 aa, unidentified
  REGION 1..401: note = Table 20
MIVNRAYKVEIKPNNVQKTFLNKSIGIARLAYNWGLNLCIERYEQCKKYLGSIGLHKELCSIKKNRFPFMYEVSKLAPQNALKDLDVAFKNFFKRKDVGFPKFKSKKNDKQTFRIDGANIKVNNNSIKLPNISSIRLKEHNYIPFGEVKYMNATISKEIDRYYVSVIVREEVDIYDKPVEEVIGIDVGIKELATCSNGEVYHNPKFTKKYENKLKREQKKLSRKKKGSQNRNKAKIKVAKVHRKIRNSRVDNLHKTTSSITKIKCRMIVLEDLNTKGMMKNHCLSKAVADSSFYEFRRQLEYKTKFYGGSTYLIDRWFPSSKTCSCCGTIKEDLTLSDRIYKCDCGFEMDRDLNASINIQNYYTVSSTGIKAFGENVRLGSDLIAPSSLVELGSKHETQLC

SEQ ID NO: 3685 - protein, 390 aa, unidentified
  REGION 1..390: note = Table 20
MMETILRAYKTKLRPTPRQRGQLAGCAGYSRVVYNWALADRIELYKAGTPTTKYAQKKRFNAIKDDLYPWCREYPQVISQEAFEDLDTAYKNFFRRVKQGAETAGFPRFKRKGGRDSFRFILGVTVEANRIKFPRLGWYTLAERNYLPTNTTIKQATVSRDVDQWFVSVLVEEQRPQQPELTGVLGVDVGAKALVYCSDGTQYAAPDKLKKLEKKMGDLQRKLARQKKGSANREKTKRKIAKLHREIRRHRTHVQHNASAYITRHAAPEVVVIEDLNVKDMTRKPKPKPRADGNGYERNNARAKARINRAILNSGVGELHRQIQYKADWLGIEVVSPDRQFASSKTCSGCGYLSADLKLSDRTYICPECGLVLDRDLNAAKNLAAWKMNP

SEQ ID NO: 3686 - protein, 400 aa, unidentified
  REGION 1..400: note = Table 20
LLIPMKILRAYRTELAPNNEQRTALMRHCGAARWVYNWGLARKIEAREKGEKSLNAHKLDGVLRAIMDEECPWLREINSYARQRALANLDNAYKNFFDRCKKGKKGRATGFPKFKSRKKGVGSYTTFHYLVHSDKVRLACIGWVRLKQSGYLPLGGYGKNTETVRFYGARITERAGRWYVSVQVEIEVPDAKPQGAAVGVDVGIKAQATCSNGLVFSNPKALESSLKKLKCLSRAQSRKFEASKKSARLLRECKNFQKGKRKLARLHARIVDLRTHHLHHASHVITRKSSVIGVESLNVAGMMKNRHLAKAVADASFGELLRQIQYKAQWRGGQVVVADRWFASSKTCHACGVVNADLTLSQRKWLCECGVSHERDLNAAHNLMNMAASRAVTACGEGSS

SEQ ID NO: 3687 - protein, 550 aa, unidentified
  REGION 1..550: note = Table 20
MIITKAYRTEIYPTDEQAIAFRKTCAAVRFVYNWALCRKIEAYRDEEANPELVKELGAKVRELKKTLKLITPDEDGGFVHKKTGEVLTTESVEELRQSLQETQQAMQGLKPKYLGQSDLQGQELAALKEKEPWLKEVPGMALLAALQNNDRAFKRFGDMVKKEGARPRGKRLTRQPGFLYRWFGAEMVESGQIEYPNLEYYPRFQTTRDGLGGFKFFSAIRVKRREIRVRGIEGYIKLAEADAMPLPPQDAAWIDGKGKNAGMWKQDGSFEYLSQTREDKSEGRLPIGQRRFASGAITEDRGRWYVSLTFTEAVPDLPPPDGVDVLAVHLGLQRLATFSDGSHVPRPAHYEENEKRLARLNRSLARGREEAKKVGRRWKQSNDYRERRKEKGDLEAHIANQRKAFSHELTARITSQRPKILVLHDWGIQGMMRDDGKRVVKKKKSNGEEVEYSYRVNLAKPISHAAWGMLNNQIKYKAQWQGIEVVIAPSEFAVTQRCSACGELNQEMGKPNPPVMFQCPCGNKMHRDDNAAKNLWWYGHQYLAQTTPNE

SEQ ID NO: 3688 - protein, 389 aa, unidentified
  REGION 1..389: note = Table 20
MLIQKSYKTELNPNNKQKTLFVKACGVRRFAYNWGLNESNKFYETTGKGLRSGELLKRLNKIKDEQFPWMKEVSTYVVQSAMHDLDEAFDNFFRRVKNGEKPGFPNYKSKRNGLGGFRLYQSICVEPNRIRIPRIGWVRLKEKEYLSTSNVKINSVTIKEKAGKWFVSLQVEEEIKIPENNGSIVALDLGLNSFVHDSDNNKVVAPKPLKKHLKRLQKLQRKHSKKKLGGKNREKHRKKIAKLYLKITNIRNDFLHKLSTKLTKTKSTIIVEDLNVSGMMKNHCLARNISDISWYEFVRQLEYKSQWYGCEVFKVDRFYPSTKLCSNCGNKKAKIGLSERVYHCDKCSFERSRDYNAALNLLKFYSEKLPIDHGDVKPLEMCSVEPSVN

SEQ ID NO: 3689 - protein, 374 aa, unidentified
  REGION 1..374: note = Table 20
MNVMEYNRLPHPRVRLPSAFDIHRELNALKKSTFPWMYECSKCAPQEALRNLDAAFRNFFRGRAEFPKFKSRKRGTGSFTLTGTIKVRPGEIRLPRLGWVRLKERGYLPSRAHINSATISERAGRWFVSINVVEHLQDTAPVEGPVVGVDRGITSLIVISDGTTMENPRALARYERKLRHVQRAVSRKTKGSANRRKTIDALRRLHYRISSARRDVINKVTTMLAKTKSVIVVEDLRVRNMMANHSLAKSIQDAAMAEVVRQLEYKTVWYGSRLAVADEWYPSTKRCSGCGHVKEGSMPLGERVYRCHVCGLIIDRDLNAAHNLKQWPGVARTLETPVEGGVQPAVNPLVQPPCESGTTSPEREAQEHGQYKHP

SEQ ID NO: 3690 - protein, 443 aa, unidentified
  REGION 1..443: note = Table 20
MLTFYPRQIELRLLEALEDSPVVLIHGPRQCGKTTLAQVIGEPRGYIYLNFDEDVLRGAAEADPVGFVADLPERAILDEVQRVPGLFLALKTVVDRRRTAGRFMLTGSANVLLVPKLADSLAGRMQLLRLHPLSQSELARQKSSFLEALFGGGFRLTGTIRVFEDRIQLPRVGEVRLKENNYLPLGKHSSASVTERAGRWFVSAQTVAPVALCAGNEKVLGIDVGVSRLAVLSDGTVYDNSKALGHAERLLRVRQKAVSRKVNGSKNRQKAATRLARLHYRITNIRKDAIHKATSAVIAKQPGAVVVESLNVNGMLKNHTLAKAVSDASMSEFLRQIRYKATWNGIRVVEAPVFFPSSKMCAVCGSINTSLILVDRKWTCPTCGSVLDRDVNAANNLKNLAVSSTATACCPGSAGFILRVLAGWNETPSWAGTKHRLPSGING

SEQ ID NO: 3691 - protein, 367 aa, unidentified
  REGION 1..367: note = Table 20
MLLGFKTELRLNNEQRIVLAKHAGTARHAYNQGLALTKQVLDWNTTHPEDKIKFPTAIDLHKWYVASIKSANPWIYEVSKCAGQYALKALRDGWDRCFKKISKPPKFKKKGQRDAFRLDGTIKILGVNHLQLPVIGVLRTFENLPQSFKPKSVTISRQSDKWFVSFNLEVEPTQTEKTNLSVGVDLGVKHFATLSNGQVFDVPALYKRLKVKIAKLQYVNRHKVIGSQGYKDFQAKVARLHYRLFCARKDFLNKLTTYLAKTFQVVCIENLNVSGMLKFGRLAGAVAMLGFYEFRRQLAYKCKLYGSRLSVIGRWEPSSKLHHKCGWKHETLKLSDRIFYCPECDESIDRDLNASLNIERIGLSLSS

SEQ ID NO: 3692 - protein, 395 aa, unidentified
  REGION 1..395: note = Table 20
MQLGFKTKLKINPIQQQLFAQHAGYSRWVYNWALATIEDFYKSGVKLSYRDARKFYTNTVKPEYPWMNQMSSRVYVYAFEHLHEGYRRLWSGISKKPTFKKKGKSTDSFTVDWNGKVKRIVGNRIKLPAPLGTVSTFEKLPSVDIKKVTVSRTADSWYISFNYEIPDISPSNIGDVDDIVGVDSGINSLAVAISLNTAKTFDNPKKYRKSKKQLARLQRQLQGKTKGSKRHTKAKNRLAKYHKQIADTRSNTIHQMTTSICKNHAVVVIENLNVNGMLQNHKLAAAVADCGFGEIERQFKYKTQKFASQLIQVDTFYPSSQLCPQCGAKQKMPLNIRTYTCGSCGYERDRDENAAYNLCLYGWNKLFPSGITGELPGSGRGGLKMPTSPVETIKK

SEQ ID NO: 3693 - protein, 442 aa, unidentified
  REGION 1..442: note = Table 20
MYSLKRELKLNNKQRSLLDGCASWARVVYNLRLSILTQSWQFEVIKASESQQLAYIRKVFTNQVKIKPEYAWIKGYPSAINSSVMNNLGKAIQGWRLGKSGLTRFKFKKKGDSFTSKNKSGVYPAKGEAMMPFTNRQVRLKRKQSTIPGLEKFRLKQPIAFVSYSKTFTISRAADKGFVSWTLPVDKILQRVHQVQTVGVDLGVKCFATLSDGSFTIAPQILKISKIKPIKNRWYNRNQKSGNRTQTIRASNNGWKYYQKLPIKPADIANLRRILGQKKITTDIISRKYYQIRIEDLNISGTIANQKLAIDRESLGIDEWSRILTYKVAFWGTEVELVDRWSPSSKTCSCCGNIQQMPLMEPVYSCDRCGVSLNSDLNAAIIWENARQSILSEASAQLTPADNTSGRHPCCKQEANVNLSEKLDLGKFCVARLESRLLQWLL

SEQ ID NO: 3694 - protein, 404 aa, unidentified
  REGION 1..404: note = Table 20
MYAIKLELKLNNKERTLMARHSGYARFCYNYALSLYQEVKNLPGGSTKKVAAIERVFTNHVKKMPEYQWTNTLSSRVYKMTFRYFKEALSRFFKGLGEFPKFKRKKDGDSFTVDAADWNHSLLLTANKSIKIPTLGTFRLKEFIPFPCVAQTFTISRTADKWYVSFAIKAEKIPPMFHPVAEPVGIDLGVSTFATLSDGNSYESPRPLTQAKTKLSKEQWRNRKKELGNRKLDVKASKNAHKHYRRVAKIHAKVANQRRDFLQKTTTEISQKYAHIRIEDLNVSGMIANHKLAAAISDCGFYEFRRQLTYKSEMYATKVELVDRWFPSSKTCSNCGHVQSMPLKERVFNCGGCNLLINRDLNAAINLSRCSEKVRLAQSEVTPVDKKEPTPLVEAGSECQICRR

SEQ ID NO: 3695 - protein, 389 aa, unidentified
  REGION 1..389: note = Table 20
MNLAFQTALRPNNKERTHLMKACGVARFAFNWGLAEWEKQYQEFKAGECDKKPNGMALKKQFNAIKKTQFPWVYEVTKYACQQPFIHLNKAWERFFNKVTVNGKPAGRPKFKKKGRCIDSFYVGGDHVSVRGDRVKIPNLGWIKMAEPLKYGGKITSMTIRREADKWMVSFQLDVEMSFLRRDNQAAVGVDFGLKQLATLSRGQKTVWENPAPLKSALRRLARMQRKLSKKVRGSGQYKKLKMRIARLHRRVANIRKNTLHQLTSYLVKHFRQINIEDLNVRGMMANRKLARAVADVGFYEARRQLTYKSEWYERMLEVVDRWFPSSKLCSGCGWKHPALTLSDRVFHCGGCGSSIDRDENASVNIENYTTASSAGIYAAEENGPAQPA

SEQ ID NO: 3696 - protein, 357 aa, unidentified
  REGION 1..357: note = Table 20
MARFAYNWALAEWRKQYRADKEYLTFCRQFNVSVYEDGLYKPNANKLDIQFNQCKQTEYPFVYNVPSCIPQQAFRHLNAAFQRFFKGQSGFPQFKKKGRSKAVFHLTNTRFSIEDKILTASSFGKVKMSRPLDVMGKIVKGSISERGGKWFLSVTIQAEKPLKTVKPFGASIGVDLGIKHLATLSNGEKFDTPRPLKRYLKKIAYLHRELHRREKGSHNREKTKAKLSRLYYKITCIRQDVLHKLTSYLIERYGVIAIEDLDVQGMLKNHKLAQAITDVGFYEFKRQLVYKAQWYHRKILTVERFFPSSKRCSCCGEVKKELPLSVRAWTCEHCGKNHDRDVNAAKNILAHANMVLV

SEQ ID NO: 3697 - protein, 227 aa, unidentified
  REGION 1..227: note = Table 20
MAETIRFEGQIKCVIISRQADKWFAAISIDTEDILHERKADSICGIDLGIKHLATLSDGSKKEGAKALNVLLKKKQRLQRELCRRQKGSENRRKTKLKLAKLEKRISDTRNDAHHKATTDIVLHNQVIAMENLNVKGMLKNHKLAKHLTDQAFGEFKRQIEYKADWYGSKMAYVDRFFPSSKTCNACGYIKEDLKLSDRLFICPDCGYKEDRDVNAAKNIRDNAVMA

SEQ ID NO: 3698 - protein, 253 aa, unidentified
  REGION 1..253: note = Table 20
MKTYEKHLPPILVKSSSNATISLKAGRWFISYKVDVEPEPVEHPHGCVGVDLGVKTLATLSDGKTFPAVKAYRKQGRKIARLQRSVSRKVKGSNNRRKAIKKLQKAHHRVACIRNDATHKLTAYLAKNHSEVVIEDLNVSGMMKNHRLAQAIADGGFYEFRRQLEYKCQWYGSNKTVVDRFYPSSKTCSHCGHIHKELKLRDRTFICPNCGFFLDRDWNAAINLAKAGSSPASACGASKSAICLGGSDASKQE

SEQ ID NO: 3699 - protein, 418 aa, unidentified
  REGION 1..418: note = Table 20
MPRSRKARKKRTSSCPKGWLPAGASVPVRLTKRQEGYCRRAIGIARFCYNLAVATHRFCRTNRLRPPSWMDISKEFNAVKRTEYPFATEVASRVAEGAFMDFGKALANWSNRDLKARAPAFKRKKATGTGTFRAASGVDQLGYNGKRRIQLPGLGSVKLACTLPQGILYEARIKRENGRWMLSILCWKEPEPKPKPDHRRRGAVDTGINPLGTDSDGEVFPNPKAYYSQERKLRRWQRAQSRRRKGSRGWWEAQRKIDKCHRRIKGLRRNAIHQMTNTLTRKFKHLVIEDLNVAGMMQGPTPKAQADSAMGEIRRQLEYKCRWRYTSLIKAHRLFPSSKICHVCQHPNAKLKRERWWTCPKCGAGNERNHNAAVNLGRLTLPPGRGPMLRDGKALAGAPRAGETGPVERRTAQLTLWG

SEQ ID NO: 3700 - protein, 366 aa, unidentified
  REGION 1..366: note = Table 20
MRIRSHVIRLKPNNKQATYFKKACGCQRFVYNWGLDSWQKEYETGNKPSGRSLKKKFNSIKRKEFPFIMEITKCVVDSAFENLNKAFNNFFRNKNKKSYPKFHKKGVKDSFAVDNSKFSIDGKIIRIPKLGWVRMREELRFSGKIMSATIKRKADMWFISISVVTDSTRDENQNFKAVGIDLGIKTLATLSDGTIFENPKIYYKYEKQLKRAHKNLSRKKKDSKNRAKARLKLSKLYYKMSCVVDDYLHKMTRQIANNYHTVVLEDLNVKGMMKNKKLSKAIAQSNFYKLRSFLSCKCKDIRFVDRFYPSSKTCSACGNIQDMSLQKRTYECKKCGIQIDRDLNAAINILRQGLPEVKSVEMKALA

SEQ ID NO: 3701 - protein, 375 aa, unidentified
  REGION 1..375: note = Table 20
MKKHQKEFCLKMTVYRAMKTKIYPNKQQKILLTKAIGVARLTKNVCLDKLKKDYKNNIKHNYFSINKWWNSIKKIEYPFVNEVSKFIQEYAIRDLDKLVKKVYDGKNDFPDFVKKGENDSFKITGSAFFFIGKIINLPKGLSIKMGRSLRWEPLRIFNVTISKKGGEWFAAIQMLIKQKSINTAMGAVGIDLGVSTLATLSTGEKFYNPKAEKIYRKKIAYLSRSLSRKKKYSRNWYKAKRKLAKTYMRLTNVRKDAINKMTANISSKYEIIALERLHIKEMLKNNKLAKYISDASLYEVRKQLEYKAKKVKYVNRYYPSSQICSICNRRNEEVKSLSVREWTCPKCGTKHDRDVNAARNILVAAGHKVKPVDYL

SEQ ID NO: 3702 - protein, 396 aa, unidentified
  REGION 1..396: note = Table 20
MQRTFKTRLKVNDVESNILAQWCGVSRLAYNVCLDQWNRDYENGVKHNYYSIKKWFNSVKREMFPFITGVSKWVPEAAIKDLDTAFRNMYRHTAKHPRFHKKGVRDSFRIDGSVIAVSGKNLKLPKGLCLRLMERFRYENQVNKINNATISRKAGYWFASISCDVGDPARENQGAGILGVDVGVKSLAVCSDGTVIDNPKTLYRREKRKKHLQRMVARKQKGSNNQRKAKALLARYEYRTAVKREDWLHKASSRIARANRVCFMEDLNVKGMLSNHHLAKAVSDCSFNELHRQLAYKTTVREIDRWCPSSQTCSNCGSRKPMPLSERTYRCEQCGMVMDRDLNAALNILNVGMANYPELMPAEDDTPEATGAASRQATAPDETGIDHQTLHKNRFE

SEQ ID NO: 3703 - protein, 376 aa, unidentified
  REGION 1..376: note = Table 20
MNTIQRAHKIRLNPTPEQEQYFRQAAGNARFAWNWAVALMRAASAQQMTLPLVGDLKAEFNRIKREQFPFMLDTTKCAPEQAFADLRQALANYFNDIRKRKNGKRRKDGKRVGFPRFNSRKRGYGSFYVFNDKFTVQGHWMKVPKLGWGNMTEPLRFQGKIMSARISERAGYWFVSIQVQLPEPEQTAPERVIGVDLGVKALAVDSDGEVFENQKHLAAALRKLRRVNRWLARKQKGSKNWYKAKRKLARLHVRIANLRADATHKLTTRLAAKASTIALETLNVTGMLKNRKLARAIADASFSEIVRQLGYKAVQVVRIDPFYPSSKTCNECGHINYALTLADRVWTCPGCGTMLDRDGNAARNIRDEGRRLVGAA

SEQ ID NO: 3704 - protein, 420 aa, unidentified
  REGION 1..420: note = Table 20
MTAIFCVKAHKIKLNPTPVQEIYFWRAAGVARFAFNWGLARYNEILDWNREHPETKQQVSGRLLRKRFTAIKPEWVSEVTAWAYIGAFEDLQAAFVMFWKKQLAGSLPPARKPRGDGRPHGWPRFKARNHTTPAFYLSNQIIRFTGHFITFDVKRVGPVNMAEEFRFSNGRILGGRISYSQGRWWLAVQVEIEHEPEHGDGAVGIDLGIKYLAVTSDGQVVDNPKALQQSLRKLRRMQRKLDRQRRANNPANFDEKGRAMRGKEWATSARMKETETKIAKTNARIANLRREIAHQFTTDIIRNNEIIGIEDLNIRGLMANYKLAKAIADAGLYEKRRQLEYKAAQNGAILVPVSRWYPSSKMCNKCGWVNTGLKLWEREWTCGGCGQVNHRDGNAAANLRDEALRILENDNRRRTTLAET

SEQ ID NO: 3705 - protein, 395 aa, unidentified
  REGION 1..395: note = Table 20
MNRAHRIRLNPTEEQEQYFWQCAGVARFTWNWALAEYNAALERGEKPNVMALKKRFNRLRKEEGFAPFVAEVQSYAHQYAFQDLQTAINQYFRNAKAKRLPSSKGKKPRKDGRPHGWPRFKARDKTVPSAGFANIGITADGHWIKLSKCPKPVNMAEPLRFDGKLMSGRISYTGGHWYISLQVEMDDPDQTADMSSVVGVDMGVKYRAVTSDGVIYDNPKSLSVNLRKLRKLQRSLSRMRDAAKTDGRKLGESKNYQKRKREIAKLHARIADIRREHAHEMTTELVREYGIVGVEDLNINGMVKNRRLSRAVMDAGMYQVRTQLDYKLKTTGGELIVVDRWYASSKTCNACGEKVDALPLSIRQWACPNCGAEHDRDGNAAKNIRDEALRMGMIV

SEQ ID NO: 3706 - protein, 331 aa, unidentified
  REGION 1..331: note = Table 20
ALTNYFRMKEEGTQPKLKQARKDGEEAGFPRYKSKKHDRLSFYLNNDKFHADGHWLSVPKLGKVNMTEELRLYGRILSGTIFEQAGHWFVSISVDVPHVIPIHRGGTVGIDLGIKVLATTSEGKEFENQKHYRRNLGRIKGLSKGLSRKQEGSQNWWKNSAKLARTHYRIGNQRKDSLHKLTTSIVKDYALIGLEDLNAKGMLANHCLAQAVSDASFFEVKRQFLYKSEQHGGYVQLVDRWFASSKTCHQCGWVKEDLRLSDREWDCEQCGAHILRDSNAAQNVKDEAIRLMTGVPVVASSGQKFACGAGRSGPLATSGETPCCEAGTRVL

SEQ ID NO: 3707 - protein, 412 aa, unidentified
  REGION 1..412: note = Table 20
MLLAHKIRLFPTAEQETYFHKATGTARFAYNWGLAQVKKALDTKNKAPGWLTLKKQLNAIKRTEFPWMYEVTKCSPEAALSDLGTALANFWAGKRKGRKVGFPHFKKKGQAKDKFYVSNDQFALLGHVIRLPHIGAVAMSEPLRFTGKIMGAAVSRTAHHWFVSIQVEVEHTSVAHKSHVRAGGDLGLKTPITLSTGKTMDAPTPLKQSLKALARANRRLHRRQKGSKNRRKAAQEVARRHERIANIRKDWLHKATTLLARRYSLIAIEDLNVAGMLRSRRLARAVSDIGFGELRRQLAYKVPARGGLLVVVDRFYPSSRTCRKCKRVKDMPLSERIYVCDCGHVECRDLNAAKNLLCEATRTVGRTGTKACGPFTSTPKRRRFGASGRNEAGSPDSDTGHSNNSINLYPVC

SEQ ID NO: 3708 - protein, 438 aa, unidentified
  REGION 1..438: note = Table 20
MKTAHKIRMNPTPEQVEYLKRACGTRRFIYNWGREQWEKQYQAYKAEQETVPEEQRVLKPPHALALKKQFNQIREQEYPWTYHVTKCVVEGAFDDLKNAYDNFFAGRSNYPQYKKKGKSHESFYLSNDKFVLGTHWISIPGLGRFILDQRQTKKDRGKLLRRLGTVNVAEKLRFVEKGKATTPAKKRNKRKHVVCERVKILGATVCCEAGHWYVSIQVEITRERPKTPEPVVGVDVGLKQAAVVSDGRRLENQRPLALHLKKLGKLQRQLSKKQKTKDPETKRTVFSKNYEKQRLKVARKHQQIATLRRDVQHKFTTELARTCGVIGIEDLNILGMMANRKLARAVADAAMGQLLQFLKTKAANAGGNLFIASRWFPSTKRCSCCGHVKKRMPLKHRTYECQICGLVIDRDLNAALNLAWFAMEMLRQRAEPHVGRPG

SEQ ID NO: 3709 - protein, 403 aa, unidentified
  REGION 1..403: note = Table 20
MIRAHKIRLNPTDEQAAFLTKCCHTNRAAYNWALAKWQEWRAMGAKPSAMELKRLWNDQIDRLRPWARESFRDAYASAFDNLGDAFSRYFAGQNDYPKFKKRGKSRMSFTLANDKFSVEGYTAKLPKIGAANMAEALRFAGKIVRGTVSMHAGHWYLSITVQMSDAPRAKTGRRVGVDVGLKTLAVTSVANGNRSDGEQLENQKPLKNSLTKLRRLNRSLSRKVLGGRNWQKATIKLARHHERIANKRRDIWHKFTSSLASRYDTVCIEDLNIKGMTKNKRLSRAIADAGWAIGFAMLDYKCTDVRRVPRFAATSKPCNECGRRKENLTLADRVWLCACGNVVDRDLNAAKNILEMGIAQPSNERPQVVATSRVKRSRTARKTASAASQVEVGTSMRAHLRTF

SEQ ID NO: 3710 - protein, 371 aa, unidentified
  REGION 1..371: note = Table 20
MISRTHRIRLVPNKTQEDFLRRACGCARYAYNWAVATWDEQYKNGLKPSAYSIKKLWSENKPDWAYESPKDAPLNAILNLGKGFSNFFAGKAEHPHFHKKGYNESFTVNNDKIVMRGKKIRLPLIGWIRMREELRFSGKVCSATVTCDAGQWHVSIPVMIDKDITPPNDFIVGVDVGIKVLAITSDGTVCPNEKQFKKKTKKLKSLQRKLSRKQKKSVNRQKALVKLQKFNRRLTNRRNDSIHKFTSGLAKNHGMAVIETLDVRLMGKDKEGKARKELKWLRCLLQDTAMKEVHRQLLYKMSHVELAPKYYASSKTCSHCGHKKETLRMDERTYHCEECGLEIDRDLNAAMNLSKMRWATPCEARGVPEGL

SEQ ID NO: 3711 - protein, 268 aa, unidentified
  REGION 1..268: note = Table 20
KESFYVNNSHAWVKGSLISLPNIGRVRLAEPLRYSGKVMSYTVSTYAGQWYVAVAVETLDDVRPHCCNPQSVVGVDVGLHHIAVASDGTTCDAPESLKRLERKIKDRQRALSRSHRNSNNYRKLLLKKQRVQNRINNIRKDVTHKFTTTISKNHGVVVTEDLNLKGMKEKAQWKSLRRSLQSSMMGMILWQLSYKAQKHVKVDRFFPSTKMCSSCGHVREEVPLSERTYVCPACGAVIDRDMNAAVNLMKSGVVNPSVPVELVVNHQR

SEQ ID NO: 3712 - protein, 365 aa, unidentified
  REGION 1..365: note = Table 20
MIRSHQIRLYPNNEQRIMLAKTVGVARYCYNWGLAKWNEMYDNGENCSTGLLSRTWTVERPEWAKETFRGSQSRSFMFLGTAFMNFFKHRAERPRRHKKGKHDSFYVDNAHARLKGDMHIRLPNIGVVRMAEKLRFAGKIQRFVVSKEADKWYVSITVEIPDESVEENMSAVGIDVGSKHWAVSSDGDVLDRPKSIQRLEKRLKRAQRSLSRKRKASRNRRKARMRVARLHQRIRNVKRDAVHKFTSRIAKNHGVVCCENLCVKGMGKSVKSIRKAVRNSCMGELRMMLSYKAAHYVEIDRFYPSSKRCSKCGNVKEELGLSERTYRCEACGNALDRDLNAALNIRDEGFRIFTEGHSESACGGR

SEQ ID NO: 3713 - protein, 280 aa, unidentified
  REGION 1..280: note = Table 20
MENKKKGQNDSFYIANDQFKIDCKKIRIPKIGWIRLKESLNLSGKILSGAVSRIADKWFVSINLSMEITPPTFKNQDVAGVDLGVKHLAVLSNGEQIEGTNPHKNLLDKLRRLNKSLSRKVKGSKNWLKSKLKLSKLHARIANIRKDVLHKLTTKLVQEFDVIGIEDLNVSGMVRNHKLSRSILDMGFSEFRRQLEYKSVIAGVKIVVADRFFPSSKMCSRCGNVKSDLTLSDRVYCCNNCGLRLDRDLNAAINLKNTAVGSTVSACGLISSGTAKLVAA

SEQ ID NO: 3714 - protein, 400 aa, unidentified
  REGION 1..400: note = Table 20
MSVVLAHNIELCSIQAQEVFLREAVGVVRFVDNWVLKEWLTRDEAYKHVLPNPHEAALRRQPNAIKCIPKRVPQYAITNLDKACNRFFRKESGYSTFKKKGRHDSARFDNGLGIVRYAGKRINLPFVGGVKMREALRLIGKTRSATCASVADRWYVSLPVEVEVLKPIRESQAAVGIDLGVTTAATLSTGERLEGPQALPKHLKRLRRLSHHYRCKAIGSNNRRKSARCLARFHARIATIWRDWLHDRQLARALVDIRMDKFKRQLRDQTALSGAMLVEANPWFPSSKMCLGCGTVVKNLPRSVWEWTGDRCGTHHDCDVNAAKILSARYSRGELRRRHACGDRSCGGIAPYRSLRISSVKKESNVSSLGMVRATEGRNDRSRRRLRTSYRIAPAEPFGV

SEQ ID NO: 3715 - protein, 1033 aa, unidentified
  REGION 1..1033: note = Table 20
MLMAHRIALDPNNVQATHLSRVAGVARFAYNWALAEWRHQYEACTLDSALPKPSQHSLRRQLNAIKREQFPWMGEVTKNAPQMAIIQLGQAFQNFFTGRAKYPKFRKKGAHDRFTLTNDQFDLNASRIRIPRLGWVRMRETLRFAGRIMSATVSRVAARWFVSITVDVPDPSHLPQAENQGAVGVDLGVLALATLSTGETICGPRPHRALLGRVRRLSRSVSRKVKDSANRHKAKATLAHLHARIAAIRLDALHKLTSDLTRRFHTIGIENLNVKGMVKNRHLARSIADMGFFEFRRQLEYKAAMRGGQVVVADRFFASSKMCSTCGHTLKELPLSVRQWACLGCGTRHDRDVNAAVNLKNMAVSSTVSACGEEGTGPRRKTAVKPASVKQEVSFESVETDLSRYDRTVSDPVPVRSGFELGWGKGAVPLCLDAATLATVARSTVSRHQQRSNAAAKDAIAQQLAARGMVLSTGQEGQLFITCPLAEHHTQPSGPTSTVYYPAHTGGYAKGAFVCQHAHCRDLPQAAFLAALGGDAACESDANTASTSAPRRKGAEAAHLMTDQANAARLVKHYGNQLMVSADQWFHWTGTHWQQDDNAAYHSAFTLSTLINAEAEEWRAKKTSTSKEQAKNERIATALAAWSKRSEMRGAIEATVALAKRLLVIPPKHLNAHPWALNCVNGTVDLRTGVLSAHRPEDYITQLIAVPYMPDACAPVFNELVARVVCGDPLLSAFLRRWFGYCATGAVRENVFAVHYGRGGNGKSTLLGIIAEVLGGYAAVAAPGLLTNSHANRHPTEIADLAGRRLVTTHEAGEGSVLRDDFVKQATGGDALKARYMRGDFFEFQPTHKLQLLTNYKPIIKCQDEGIWRRVLLIPYKAKFGTAEEVAAGVATCLQDTQIAERLKEEKTGVLAWIVAGAVEWYRNGLTPPECVRMASRAYQTEQDHTLQFLSEECTLGGECAEKLSTPTGGGLYPAYTVWCKASGLYPLSKTRFLGELERAVPHFSKKYIDRLAEGQRTKALLVHGVQLMSTPL

SEQ ID NO: 3716 - protein, 257 aa, unidentified
  REGION 1..257: note = Table 20
MSATISQVAYRWFVSITVDVAMIQLPKAENQGSVGVDLGVSALATLSTVEKVPGPKPLKALLGRLRRLSRRISRKAKGSANLRKAKVKLVRLHDRISNVRLDALHKLTTCITCRFSIFGIEDLNVCGMMGNRCLDLLIGDVGIYELRRQLEYKATMSADSVVVADRFYANSKRCSACGSVFESLPLSTRGWKCPACGEVHDRVLNAAKNLEYLEITTASSAGNYACGETGSGLAFCAKRNCLDEAGSQLCRWLSSSE

SEQ ID NO: 3717 - protein, 410 aa, unidentified
  REGION 1..410: note = Table 20
MIRAHKITLKLNNKQKTYMAKASGCARFAYNWALAEWQKEYAAGKKPNEAAMRRSLNAVKTTEFPWMLEVTKCAPQMAIKDLGKAFQNFFAKRTGYPKFKKKGLHDSFTLSNDQTKICGKRLRIPNLGLVKMREELRFDGKLLWVTVSRSGNDWCASVSVEITDATTIQVNNAKVQSNSVVGIDLGISQLATLSTGEVFANPNALEKKLKTLRRVSRGLSRKQKGSRNREKSRRKLCNLHRSISDLRSDALHKMTTSISKRFGVVCLEDLNVRGMTKNKHLARRLSDSSFGEIRRQLEYKTTSRGGRVLFVNAFFPSSKLCHVCLAKNESLTLADRTWQCSGCGTVHDRDLNAALNIRNHAVSYTVAGDARKACGEDGSGSKAVKRPRVKPASMKQESSVELTQVGLGRS

SEQ ID NO: 3718 - protein, 406 aa, unidentified
  REGION 1..406: note = Table 20
MSNTRHRSQIFLLRPTKEQAEYFARAAGIARLAYNWALEEWKRQAMEWWTSGKQAPFPTAFGLQRQFNAIKRDRWPWITDVAAIVPERAIFAVGQAYESFKAEQAKYPRFKAKGVSRDSFLGAGKSRECTIVANRVRLPKLGWVRLSREARWPDARIMNAAVSRRDGRWYASISFELPATETLTRPNLAAGVDLGIKQPIKVFCGGVATDLGGDLLQRLNVERRKLRRANKTMHRRVKGSGRRRRAQAKVARVHKRMADIRLNFQHKATSVIAGMASRIGVEMLNVKGMLRNRSLARHIADVGFYEIKRQIGYKAEALIEADRFYPSSKTCSCCGSVKEKLALSDRSFDCEGCGFTCDRDENAARNLERMAADRAVPARGDGSSVRRRKLTLRSLSMKRETESDGP

SEQ ID NO: 3719 - protein, 392 aa, unidentified
  REGION 1..392: note = Table 20
MTTTIVRAHKIRLVPTRQQEQHFVQACGTARFAYNWGLAEWKRLYQAGMKPNARQLDKRLNAIKQARFPWMYEASKWAAQMALQNLGNAFKNFFSRRGKYPRFKKKGRAALSFVCAVGIQEIKVRDKRLWVPKLGWVKMRQRLRFEGKPLRVTISKTADQWYAAIGVEMTWVVPVRKNQADGGLDVGISPLAVESDGTRWENPQALNKELRKLRRWSRRLSRRTQGSRGHREAQLRIAGTHKRIADIRADCHHNLSRSVVDKYSRLGVEDLNVSGLVKNRRLSRHLSDAALGELLRQVRYKAEQYGTEIVEASRFFPSSKTCSACGRKNESLTLSDKQWICECGVQHDRDRNAAINLRNYCRAGYARTTPMDSEALAARSFGGETTLGEVGI

SEQ ID NO: 3720 - protein, 434 aa, unidentified
  REGION 1..434: note = Table 20
MILAHKIALDPTVEQAIHFARAAGTARFAWNWGIAEWKRLYEAGGKPSATKLKAQWNAVRRTEFPWSCDVTKCASGQAIMNLGTAFGNFFRDLKKPKGQRKAGYPKFKKKGQHDSFALWNDQFEAHGCRERFGKDRGEIRIPNLGWVRMREPLRIGGRILGAVVSREAGRWFVAIQCEMPDAEAAHPAPGSVVGVDLGISALMALSRQLLDGRTKIENPKSLRKAMRRVKKLSRRISRQEEARKKRAAKTSRRMRNRRAQLAKLHGRVANIRRDAIHKATTAVASTFETIVLEDLNVAGMGKNHALAGSVSDAAFGEIRRQFEYKARMRGGHVHVADRFFPSSKTCSACGCVVDKLPLSARSWACAECGTVHDRDENAAINLEHLVVGPAWAEPSPGNPAATLGEIAALAASQEAVKLRSVNRELNPCAHVRTN

SEQ ID NO: 3721 - protein, 442 aa, unidentified
  REGION 1..442: note = Table 20
MIVVHRIALDPNQEQETSSRKAAGWARFAYNWALGQWQRQYADGGKPNENDLRELLGAIKAETFPWLMEVPKAVIQQAIEDLGAAFGHFFRRPEEYRHEPDPRRKGRLARKLGYPKFKKKGRCRDASRADNGPPTTGADAVRVDGIDVVLPKIGRIRMRERLRFAGQVKSAVASRTADRWFVSLAVAVPDEVLPRKSHAVVGVDLGIATPATVSDGRDPYEAPRPLRRLAKTRRRLGQAPARKRGPGPGAAPSRDFLKAQRRLARLEARIADIRIDATHEATTDLCRTCSEIVLEDLSVSGMLANHTLANSLADVGSSEFRRQVAYKAKRHACTVRLAPRFFPSSKMCSECGHVNDNLKLSDRTWTCPACGTVHDRDSNAAKDRASLAESTPATARIVGSKGAAILPLPSGNRAASSGPRRTPRTKLAAMKREPTRGRKSQG

SEQ ID NO: 3722 - protein, 389 aa, unidentified
  REGION 1..389: note = Table 20
MLLPNNEHCTFFKKACGVSRFVWNWALAEWSRQYKAGEKPSAFGLKKQFNTIQKELFPWVGEVNSQAKQQSFADVGSAFSHFFRRVKKGEKPGYPKFKKKGKSRDSFYLANIEFKVDGHYVRLPKIGRVRMRESLRVSGKIMGARISREGARWYLSIQVEIAEPKPKFISENQTDAVGVDLGVKSLAVLSTGEFIDGPKAYAKNKDKLARLQRQLRPGKRKRGSRLYKAYQQRVSTLHRKIAGQRNNALHQLTAKLTQEHSLICIEDLNVKGMSSSAKGDVEKPGKMVKQKSGLNRAILDMGFYEFRRQLDYKSSITGSTLSVIDRWAPSSKTCSDCGGYKKDLTLADRTYTCSGCGLTIDRDINAAINICTLGARGINARGQDGSANC

SEQ ID NO: 3723 - protein, 463 aa, unidentified
  REGION 1..463: note = Table 20
MKLNATQAQCLFFGRAAGASRFTWNWALAQCTDIRHATGKNPTMGDLKKRFNAIKETEFPWIYDSPKDANQQPFTFLQRAWTRFWDGVKDGKIPVWNTAQKKALLAEGKKRSELSFAPTFKKKKDGASFYVSNDKFSIDRESRTVTLPKVGQVKLAELPRFRGKVMSGTVSKDGNDWYLSVQIDVADRDYFRFRSGDGVIGIDLGVKDTAVLSTGEKLTGPKPFKRACRRLAILQRRVSRKQAVVLDSLGLNGKAIPKGTRLTKSNNQKRSERLVHAVQSRVKHIRQNFQHTFTTRIIRENQAVVIEDLNVAGMMANHKLARSIADIGMGEIRRQLTYKAARYGTALHLADRWYPSSKTCSDCGWKKADLTLNDRTWVCEDCGVIHDRDVNAALNLKNLVPKVLAPQDEVVLPGGYRERHALPVEVLFQPSEFMSALGEASGQEKKGNDSLSESVVHQTTLLG

SEQ ID NO: 3724 - protein, 250 aa, unidentified
  REGION 1..250: note = Table 20
MTQALRFGGKIMAATVSRRAHRWVVAIQVEVAASMRVPSERRERLGVDLNTGSIDLSDGKSIPTPRPLSKRAKRLSRLSKKTSRKIAYAKVAAGIAGDQAMPTGTRLAISINLRKTNDQIARLHAGIHHQRQDWLHKNTTRLCRENQAVVLEDLSVQGMTAAARGSPEQPGKKVRQKAGLNRSILDVAFGEFRRHMDYKAALYGAELIVAAAPEHDHGALEKDVHAAKELGQARAKASAEARVSTSRNRS

SEQ ID NO: 3725 - protein, 421 aa, unidentified
  REGION 1..421: note = Table 20
MLTAHKIELAPTAEQLDYFRRACGTDRFTWNWALAEWNRQYASGMKPNAMRLKKQFNALKYAQYPWLKEIHRDAHADAFARIGKAWTKFFTELKRGEEAHTPVFKRKGRCIDSFYVANDKLTLEERSVRLPLVGKVKLKESPRFADRLLGATVIREGTRWFLSVQFDVSVTLLAAKPERDVIGVDLNVAQIVCSDGTRYKTPRPLKVMTRRVKLRNRSVSRKTEAAKAAMGLSGQAIPKGTRLPQSNNQRKASQMLSSTHFRVGCIRRDFQHKTTTDIARKTHAAVVENLSVKGMTAAARGTAEKPGKRVRQKAGLNRVILDVGFYEIRRQLEYKLQRFDREIYIADRFFPSSKRCSCCGRINKDLTLKVRTWQCATCGAVHDRDDNAATNLELWATDSKLREAFAKVTPVSTGNQPGSRV

SEQ ID NO: 3726 - protein, 394 aa, unidentified
  REGION 1..394: note = Table 20
MILAHKIELDATFKQRKYFASAAGCARFVWNRAVAEWDRQYADGEKPSGMKLAKEFNATKYDKFPWMKLVHRDAHARPFLNLDKAYKGYFKKISQKPKFKKKGRCKDSFAVANDKFRLDGKSVVLPKIGSVRLREELRFTGKIMGAVVSRTADRWFIAIQVDVGEHHKPRTGNGVVGVDLGLNVTAMVSDGQRLVGPKSLKSNLKKLRRASRSHSRKQKGSQNRKKASRRLARIHAKVANVRNDWLHKQTTKLARENQAVYFETLSVKNMVKNRKLSRAISDAGWAEITRQAEYKSAIYGGVFGKIDRWHPSSKECNQCGQIKKDLKLSDRVYRCDGCGHEEDRDLNAAKNIRTAGLAGSYAHGPEGADHRRKAKMKPCRVEVGTKPCPQVDTL

SEQ ID NO: 3727 - protein, 384 aa, unidentified
  REGION 1..384: note = Table 20
MLLSHKIALAPTAEQEAYFRRACGTARFVYNWGLDRWKKWYEGWKELSEDQKKTTSKPSKEALGKILRRAVMFNPGWFWLREVDSHIPTGALRNLGAAFANTFRRLKQGQKPGFPNFKKKGIHDSFYVHNRCMEFNGKRLLLRRGKITGPTTIKMREVLRFEGKIQGGAISREADRWFIAVQVEVKDYAKPRTADKKVGIDLGVLRAVTTSEQGIVYDSPKPLKTMLYRLKRKSRQLTKKKKGSANRERARNQLARLHRDIRNIRQDFLHKTTTQLCSENQAIMIEDLNVKGMLANRRVARAIGDIGMFEFRRQLDYKTKIYGSELVVADRWFASSRTCSKCGSKKDELKLSERVFRCSSCGLEIDRDLNAAINLLNYPEAQGK

SEQ ID NO: 3728 - protein, 379 aa, unidentified
  REGION 1..379: note = Table 20
MTFLSRRNMEVSATCFDKCCTQHLSKKAAYEHFMREVRQPWMAEVTSRAPRNAIDDLDTAFKSFFRRVKEGRAPFGFPRFHRRGRHDSFALREKPKFGVDGRRLRLEKAPGRILMRQALRFTGTLHSVTVSFRAGKFFAAIVVDTEDYETRSGTREPSVVGVDLGLKDFAVLSGSGEHLHLPANRKLKASLRRLKRLQRSLSRKEKGSNRHRSAREKVARLHLRVADQRQAMLHEASDMLTRRFDTIVVEDLAVRNLARNRRLSQAVMDSGWAEFRRQLEYKADLRGNTVVVAPRFFASSKACSRCGAVKSDLGLDERIYRCETCGHVQDRDENAADNLERHGLHTLPAVPKRASETGETDEALPRRTVAKDRREEACV

SEQ ID NO: 3729 - protein, 366 aa, unidentified
  REGION 1..366: note = Table 20
MLLAHKVELRPSSQQEQYLQQLCGVSRHLWNQLLHHFSGEDVKWSKKSAREKMYSLREEYLWYSDYSANILRCSIDNLDNAYKKFFKTKKGYPKFKSKHQKQSFNIYESQKFKVDGRDFRIEKFNKSKKSKPIKMGEKLRFEGKVKQANVSFQNGKWFCSFLIEVEVYKGNFDQHGSVGVDLGIKDLATLSDGTTFQKSNKLSLSLKKLVKLQRKLSKKKRETNRYAKAKLSIVKLHFRIKKQREALLHNVSDELTSKYKTICLEDLAVSSMTKGKGKKFNRMVLDVGMYELRRQLEYKSLLRGVDIYFVDRYYPSSKLHYECGFKNETLKLGESTWKCGGCGQLVDRDLNAAKNILTEGLRLANN

SEQ ID NO: 3730 - protein, 397 aa, unidentified
  REGION 1..397: note = Table 20
MRIEEIIFALCLLSIIIKDKHFNENAILLAHKIEIRPNQEQEEYLLGAVGSRRFAYNHLVAYYNEQKKLTKTVSVKLIKELRAKYEWLEDFSTRVIRNCVDDIDKAIKRAWSPQIIIERNRAIDKASTPKQKLKAYNLGMPQFAKKGINESFSIREKEKITIKDRKFKVEKMPFYIKMRNKIRFSGVVKQVTISMQGGKWFASFLIETTDKHEEEQKPRLDSVGVDVGIKELATLSNGVVFPKSQPLKKQLKRLRQLQKKLSRQIRYSNGYKITKAKIAKLHYFVSQKRKAIIHELTDYLVKTFNRVAIEDLNVKGMIKNHKLAKAISDVGFGMFKEILTYKCKLYDVKLVLVDRFFPSSKICSKCGTKKDNLKLSYRVYNCNSCNLVIDRDLNASL

SEQ ID NO: 3731 - protein, 402 aa, unidentified
  REGION 1..402: note = Table 20
MKLLSKIQDNLRKLECKSMLLAHKIELRPKASQAEYLNKSCGSRRHCYNQLLEHFSKPDNKWSKAAAYQYYIKVIRPAYPWYNEVSSRVTRNAIDDLDDAFKHFFRRVKKGGKPGFPKFKKKDINDSFALREKTKFEVKGRKLRIEKLKTLIPMRQRLRFEGTPKQVAMSKQAGKYFASVLVDTTDYKDYSQNRSPSVGVDFGVKSLAVTSDNEVIPSNNKLKKSLKKLKHLSRSLSRKRKGSNRRAIAKQRLAKLHYRIAQQRKAVLHELSHSLTANYDRIAIEDLNVKGMVRNRTLARSIADAGFGMLRQLIEYKAFLRGCTVELVDRFFPSSRMCSGCGQLHDITLADRALACDCGLTIDRDLNAAINLNRYRRDTLKPDVKRTQEPSKTALAASVWTV

SEQ ID NO: 3732 - protein, 560 aa, unidentified
  REGION 1..560: note = Table 20
MLIAHKIKLLPTPEQAALFRRCETVAKATYNQALRMWQEDYQRYLREMVALCGSRGISALTDSPRCLWPRFKKRSDLEKELIAAGVAKDDIPATSGFRWISKHYANRPAHWEDLGYWPGAGKITNLKDAANHFFKDGFGYPRPIKEDDVCGFLVLSSAEKCGGKKDANGRHNGPFARHVDRPVWQRPLEFNVPKIGKVRMAEPLRFEKFETQKKISPRGKNEGQEIETFPVASVTISRNKAGDWFASILCSVPEIEPNAPVRDYKVGVDLGIKTLAKLSDEVPGQPDRFPARKALSNAERRLLRLERKMSRQQAQAARRKRKLSECKNYQKTKRLHALAWKKVGHRRESYSHQLTTVLVRDYPVIGIEDLGVKGMMRKGKPGNKPKKARLNRAIGDAGFGRFRIQLEYKAKWHRREVHYTPQFEPTSKVCNQCGWKNEKLKLSDRQWRCGGCETIHDRDLNAALNICRKSVPKSSDDPSVAGKDEKDVKSGSAKSRRGRFVSRKSEGDSSSPFDPGAVDTEQSVVGAPNGQKALEEATGHRRNNADFSRSSGFKSRLDGY

SEQ ID NO: 3733 - protein, 558 aa, unidentified
  REGION 1..558: note = Table 20
MSQAAHKIELRPNQSQAATMRQNCGLARYAYNWALRAYTAQYECRRKHIAWLCQDHGVLTHIEERDGRSKRRPEKDLLADLSGKGVTDPILPMRPDINTISRRWTLLKPDWAEDLYADAALQAIRNLGTAVKNFFDRLKKGQGGRKAGFPRPKRRDIHDSYAAAPRKSNTTYRENGTVLSCVRDRRVKLPKIGWVRMAESLRFSGTVCSITVSRRAHKWFASILVEVDSKVSGTEKNKQAKWGKPAVKFEPLPRSDAAVGVDLGISHAIALSDGTTHDGPMPLRQALRKLRRMQRSFSRMRTAATGKQPSRHDPTRAASAARKKARRDARYLEKLARRHGCTPEDMKERHDTANRAKRNRRGNADAPKRGPCKLRDAKNYRKQKLRIARLHYRISCVRENWLQERTTRLIRDHGTICIEDLNVSGMLANEKLARSIADIGMFEFRRQLVYKAKSYGRKVVTADRFFPSSKLCSKCDFKYEGLALHERAWKCPQCDTNHDRDVNAALNLLRVGTGMYPGIDAELSKKSPAETGIRRSKTRSLTSSRSKKQESDRLTAEG

SEQ ID NO: 3734 - protein, 387 aa, unidentified
  REGION 1..387: note = Table 20
MIVNKSHKILLKTTPEHDRLFTSWCGAARWSYNRGLERKIATYQERGRSIGAYALMQEVVALKQTDEYDWLKEVPKSIPRMALMQLDEAFGHFFGRVKEGKAEKGFPRFKSKKRSRLSFHLEPDGIAVNEKSVRIPKLGWVKVHQEIRFKGKLVGTVCISQSAGKWSITFTVETDIGEVENQDKPVTGLDVGVKNLAVLSDRTTFENPKAFYRLERLLARAQQQMARKQRESKRWQRAKLRVQRVHKRIADLRANATHQVSAHVARHYSGVAIEDLNVVGMVKNHNLAKVVLDANFRELHRQLKYKMVWAGGEVRQVERFFPSSRLCHRCGVINDSLTLADREWICTCGTCHNRDENAAINLAKRGWPGVDGHCAGTVRRSHAPDEP

SEQ ID NO: 3735 - protein, 348 aa, unidentified
  REGION 1..348: note = Table 20
MVEWEKQYAAWKINPTLPKPSDPALRKHLNAMKREAFPWMLKVSKSVVQEALRNLGVAYAHWFEDLKKPKKQRRFHHPKFHKKSKDRDRFQLPNDQVKVDGPRVYIPKLGWVRMREALRFDGPIQRVTVSRKADHWFISLTVETADSQPLPQTDRAGGLDLGLKDFVVTSDGIKVQLLARLILLEQRQRRLQRELSRKVKGSKNRAKAKIKLARCLEAIANVREDFLHQLSIQILRAYDIIGIEDLNVAGMMKNHRLARAIARSAWSQFKEFLRYKADWYGKTVREVDRFFPSSQLCSTPGCAYQYHDLTLDERTWHCPECGVVHDRDINAAINVRNAVSSTGSACGA

SEQ ID NO: 3736 - protein, 285 aa, unidentified
  REGION 1..285: note = Table 20
MQARPAEGTYPQGVKIHWENGVIYLPKAGWIRAVFSRRFQGQVKTVTVNRAPSGQFFASVLVEDENQVPEPVLETIDRAVGVDLGLHDFAVLSTGEKVPHPQWLERELYRLKILQRRLAKTTKGSKNRAKARQKIARLHERMVNRRQDALHKLSTDLVRRFDTVCIEDLNVAGMARNHALARRIAQSGWAEFRRQLEYKATWSGKHVRVIGRLAPSSRLCPCGYYNHDLTLADRQWDCPICQRHHDRDVLAANNIKRFAFAEHETGRDTPGVPGERPPVDDRRRP

SEQ ID NO: 3737 - protein, 404 aa, unidentified
  REGION 1..404: note = Table 20
MKRMIVHRAFKFKLDATSEQEQSFRQYAGALRWVYNRMLAERREAFKAGVKAPPTNEQIKQLPALKRQEETAWLNTVHSQVLQDAVLDLDDAFARFFKRQTRYPQFKRKHGKRQSFSYLQGVKVDEDRVWLPKIGWVAFRRAHQAKRYREIVGTIKRATVSHKASGWYVSLLTEQTLEDPQPVPISADNSVGVDLGSIDLVVTSAGVKLANPRHYRTAERRLKREQRKLSRKQRGSHNWHKQKQKVARLHERIANRRLDSLHRLSCQLIRENQAVFCEDLNVLGIARRMGKSVGDAGWGELLRQLEYKAAWAGKTFVQIGRYFPSSKTCSACGYQHRELTLAERRWTCPACDTCLDRDVNAAVNIHREGLKYVAAGRTETQNACGETVRPARRARLREARIPRL

SEQ ID NO: 3738 - protein, 338 aa, unidentified
  REGION 1..338: note = Table 20
TALKYEPDTTWLREIDSQLVQQALADLKRAYTNFFERRATYPKVKHKKTDRLRFRIPQRVTLSDGYVTVPKIGRVKVRQSQEVEGTTKSATFTRDACGHWFVSLVAEIEMPVVVLPAPTEERTIGIDLGLKDAIVTSDGERVAAPQCYRRGQRKLRRAQRSTSRKKKGSKNRAKARLHVARVHQKIAAKRNDFCHKLTTRLIKGHEAVCIENLTVKGLVKTKLAKSMLDASMGTIRRQLAYKGEWYRTHVVAVGRFYPSSKLCFECAYKNEALTLSDRVWMCPSCREMLDRDLNAAKNIKREGLRLLAETVAEGRPETLNACGQDVRPAMPADLALPA

SEQ ID NO: 3739 - protein, 386 aa, unidentified
  REGION 1..386: note = Table 20
MITTKTYKFRLDPTREQEQEFLRFAGCRRFVWNWALARKQAVYKETGKTLGYNALASELVALKKQPETAFLKECHSQALQQTLMDLDKAFVSFFAKRTKFPRFKSRKRTPNAFRIPQNVTIVDGRVSIPKVGLVKARLHREMQGTIKSATIKQEPNGHWYVCFISHIELPDVEPVWDAPVGIDVGLESFFTLDNGEKVKPPKFYRKAERKLKRLQRAVSRSQKTSRRRCKRKKVLAVYHARVRNQRNDWLHKISSKLISRYDTLCIEDWNLKGLVKTKLAKSFTDASLGAFVRMLVYKAEWNRCRIVKVDRFFPSSQTCHPCNHRQHLELSDRQWTCGGCGVIHDRDPNAAINLLLEGMRILAVGSPESQNDKGGNVRLAKVSSSR

SEQ ID NO: 3740 - protein, 402 aa, unidentified
  REGION 1..402: note = Table 20
MYDKTMKKSQVYKLNPTKTEEAMFRQFAGASRWVYNKALERCREHYRETGKHLDPRRFQGVITKIKKEPDTAWLSSVHSQVLQQPTINLKRAFDNFFEGRAGEPRFKKKYRNDAFRYPQGVRIVENRIYLPKIGWVKFHRSRDNIDGTIKSATVKRRASGWYVAIVLETGKVEPGAPVPTRESSVGIDMGLRAFATLSTGDVVDMPRYYVEAQRRRRKAQKALSRKQKGSNNWIKQLKRVQLLEEIIARGRRDFQDKLSTRLVEKYDLICVETLNLSGMKKALNLGKSESDRAIGQFLRMLEYKCAERGVHLWRADRWWPSSKTCSSCGHVNRDLKLKDEVFECPVCNLKIGRDLNAALNLVAAGLAETLNACGEDVRPAATQVDGGLTFVKQEPERYLIPA

SEQ ID NO: 3741 - protein, 298 aa, unidentified
  REGION 1..298: note = Table 20
MKHFCRRLKKKEKPGFPKFKKRGQKDSFRYPQGIKINGNAVFLPKTGWINFTNTRPIEGTIKQATIKRDGSHWLIHIACAVPVEIVYAPVSEDKAIGIDLGLLSFAHMSDGTVIDNPRCLKHELKQLRYLQRSCARKQKDSSNRKKSIVKIAQLHRKIRNKRKDFLYKVSTVVVKNHGVIAVEDLHVKGMIKNRHLSRSIADVGWSSFLQYLEYKCHWQGKHFVRVNRFLPSSKMCSSCSIQKDMPLKLRTYTCSSCSLIIDRDLNASKNIRSAGISALKTCRANSIGLRNEAGITGF

SEQ ID NO: 3742 - protein, 383 aa, unidentified
  REGION 1..383: note = Table 20
MLLKKGFKFRLDPTQGQWELCAQFAGASRFLYNRGLEQRKAIYEAEGRSMTYFAQNNELVSLKRQEATSWLQLIHSQVLQQALKNLDTAFQNFFQNVKSGKKPGFPRFKCKGLRDSFRYPQGVKVDGTSVYLPKIGWVRFRKSREIEGAIKQTTICREGDHWYVAFSTEQEVPTPAFAPINEDKAVGIDVGIKHFATMASGSAHIPTYVSNPRFFTKHLPRLRVLARRLSKKVKFGKNWLKAKKQLSKLYARIKRCREDFAHKLSTEIVKNHDIICVEGLDIANLLEKSARPLSRAIADASWRSFLRCLQYKAKERGKHFVETGRFFPSTQICSACGANQKIGLEEREYRCPSCAMSMDRDLNSAIVEKAAGMSVLKACGATP

SEQ ID NO: 3743 - protein, 431 aa, unidentified
  REGION 1..431: note = Table 20
MGAKMQVRRYRYKLRVISKAKERKLLMFAGAYRLLYNLALLQREFLWWQKRERTNYARQCAELGMLKEEFPWLSEVHSQVLQQALRDLDRAYRNFLAGRASRPRLKKRNRHLSFRYVQDVKIDGNRIYLPKIGWFRMFLSRKIPRDAEIGEVTILREPDGWYVSIVVKGNFCRQAEDTKLIGVDVGIRDFACLSDGTRIEHPRILEKWLRKLAWEQRKLARKKKFSKRWQRQAQKVARVMRKIARIRHDFLHKVSTAIAKNHGVMVEDLKIKNMSRRTKGKGASARSALNRLILDSGWGSFLRMLEYKCEQYGQVFLKVAPQRTSQTCSVCGFAHPKNRKGKRFRCLACGHAEDADVNAAKVILQKGLAALLKGPTAGPAGSNARGEGSGSGTGACPVYEPSFAETGIPRLWSWEGQALADNRLAELGGLR

SEQ ID NO: 3744 - protein, 1063 aa, unidentified
  REGION 1..1063: note = Table 20
MLKAVKVRLYPNAEQKQCIASQIGGARYVYNRALTLRKYVYTKFGIKIGKFALINHITKLKKRANTSWLKEIDSQAIQQSIANMDKAYQHFFKGGGYPKFKSRHHSRQSFQYPQRVKIENNKVYLPKVGWVKCKGLRKEFVGKIKTVTVSHEAYQYHASILVDTEEKKTVISHNSKSVGIDVGVALVVADSNGKKVKPLDLMRELKKLRTKAQQLSRKKKGSNNRAKAKAKLAKQNLRIANMRKNFLHKLSKSYSQNQTVVVEDLKIKNITYLSVGYTATMLLIKLGLPSGRRIHLIYGWSINTYLALFYYNNPLIYRPKRTPNMAQIENLDHVLKTHKLSKAEYEEILRILEGRHPNIVEIGIFSAMWSEHCSYKSSKKYLNGFPTKAPWVIQGPGENAGVIDIGDGMAAVFKMESHNHPSYIEPFQGAATGVGGILRDIFTMGARPVANMNALRFGTVNGNSDIARYQRHLVRGVVDGIGSYGNCMGVPTIGGEVSFDESYNGNILVNAFALGLVKSDEIFLGVASGIGNPVMYVGSKTGRDGLGGAVMSSDSFTEESKSLRPTVQVGDPFTEKLLLEACLELFKADLIVGIQDMGAAGLTSSSFEMAGKTGAGLILHLDKVPAREEGMTPYDFMLSESQERMLICAKQGCEQAIIDIFEKWELDVAVIGEVTDTARMELMWHGEKCADMPIAPVSEEAPMLDRPTARPQYLDAVNAKTLSDYKTVDNQEAYETLLSHIEVSDKAWVYNQYDSMVQTNTTKGPGSLDASCIRIKENGKALAMSSDCNPRYCYIDPRKGAALAVVESGRNVAMSGARPLSITDCLNFGNPENPEVMWQFAESCEGIKEACLALNTPVVSGNVSLYNETNGVSVFPTPAIAMVGLNEDENKILPSAFQKEGSLVLLVGETKGEFGASLYIKALHGETTGSLPAFDYSAELALWELVIEANKKGLLNAAKDVNVGGIAIALSKMAAVSSMGVTVSVTLEASRDIFDESQSRALLEVSHTNMVAVVAMAKELGLEICVIGAVGGDKVSINDVALPLERVQELYFTTFAKTIEQDL

SEQ ID NO: 3745 - protein, 399 aa, unidentified
  REGION 1..399: note = Table 20
MIATIEKLETETVVSVNKTFHYKLKPTKNQEIIFGQWLGTCRYLYNVSLEYRKYLYAQKGVNISKFDLINEIPEVKKTEGFEWIKQVPANTLQAVIERLDNSYQRFFKLGAGFPKFAQKNKYKSFLLKNNSSGSEIKVSGNRFKLPKIGHVKFFNSRPVESKIKTATIRKEADGWYISVTFVGNVEALPLLDNNVGLDLGVKYFAVTSDGEYIDNPRHYNKYQDELRILQRSLDRKKKGGNNRNKASIKLDKIHQKIANTRKDFLNKVSTKLISENQSVVVEDLRIKNLTKKSKPKLSDDGKTYLKNNRKQKAGLSKSILDAGWGMFCNMLDYKSKWFGRWFVKVPAQYTSRDCSNCNFRTEEMPLTIREWQCPQCNSFHNRDENASKNILKKWLEDQN

SEQ ID NO: 3746 - protein, 363 aa, unidentified
  REGION 1..363: note = Table 20
MKTYRFKLKPTPVQEHIFAQWLGSCRFVYNLCLEYRQLMYKQWQKSVSKNELQKQVKDLVSEVEWLKPLHSQTLQDVTDRLEKSYDRFFKLGAGFPKFAKRHQYRSFSFKQGVQRRAHDSERIGKVYLPKIGVVAYIKSREFQGTIKRTSIIKEADGWHIAFAVEIVQTPLPRATNHVGIDVGLESFATLSTGEKIAPPRALRRRERHLKRLQRAVSRKSKGSNNRKKAVHRLAKEHWRIKRIRQDFLHKLSTGLIRENQAVTVEELHVRNMMHNHHLAKSIADASWYEFMRQLEYKAMWYGREFSKVSARNTSKMCSVCGTKAEFMPLRVREWRCANCGTHHDRDIKSGRADRVSLGDIQRR

SEQ ID NO: 3747 - protein, 208 aa, unidentified
  REGION 1..208: note = Table 20
MLPELETETGVDLGLTHYAILSGGDKIANPRWLRRREKKLAKLQRALSGKEKGSKNRDKARAKVARQHVKVADARHDFLHQVSTSIIRENQAVHVETLSVRGLARGCHAKSVNDASWGAFLALLEGKAVRYGRILARVGRCYPSSQLCPCCGWRVGRLPLGVRGGTARLVVSTMTGTSPQRSTSCCKDNASPWSPGWLDTAKTTVEGR

SEQ ID NO: 3748 - protein, 386 aa, unidentified
  REGION 1..386: note = Table 20
MFQRAYHVRLYPTRQQEVLLSKTFGCCRKVYNCMLEARKKSYEATGTACRSKPSDFYSEFPFLKEVDSNALTAEVLTLNAAFKNFFERRADGVGFPQFKAKHKDRDSYTSYTTKDNIRVEGRKLRLPKVGFVSFRNYVDIDWSVRDIKHVTVSRSRAGKYYASIMVEEAVPKALPTTEAEVGVDLGLTEFCVTSDGEAVANPRFLKEAEGRIAALQRAFARKRKGSNRREALRVRIAREHEKVVNQRKDFLDKLSTRLLRENQTVVVEDLDVREVAEGDHAKSEHDTAWRVFLNMLQYKADRYGRTIVRVGRWFPSSQLCNRCNYRNPMVKDLTVRSWTCPQCGTSHDRDFNAAINILTEGKRLTAAGTAVQGAGVHLDKREAAAI

SEQ ID NO: 3749 - protein, 396 aa, unidentified
  REGION 1..396: note = Table 20
MLNVKINRAYKYRIYPNKSQQEALAKLFGCVRYVWNWALDLRESYYKDTGKALLASEISKGLTDLRKSQDTLWLSDVSRISLTQSLRNQYTAYDRFFKRISGKPRPKSKHAKQSAYFRHNDIKLSHRGIKLQKVDSEMRVNFHRPLPKDCEIRSVTVSKDKTGKYYVSISVIETIAQLEPISAKIGIDLGLTNFAVTSNGNKSIDIRILKKKNKRKRRAQRVLSRRKRGSKNYHKARVKLAKFEAKDANIRKDFQHKLSKRLIDENQAIGIESLRIKNMMKNKRFAKSIGDVAWGQFKAMLQYKAEWYGRDVVPLDSFYPSSKICSACGHKVDELPLRIRQWTCPECFTEHDRDVNAAINVRNNTVGMTEIDACGVTVRPAITEARHREARNILVA

SEQ ID NO: 3750 - protein, 411 aa, unidentified
  REGION 1..411: note = Table 20
MVLKAYKFRLYPTGDQIRYMDQIFGSVRFVYNWGLDARSGNWDMIETMRYSWGGDLKTCDMEMVAQMRFWGLKDKSKEGYPKACGLKELSSELTHTVQKEKPWLTEVPNKPLRYALRNLDAAYKNFFRRVKNGETPGYPAFKSRKGNQSFQFQGENVRLDEVTGLVTLHKALGPMDVRLHRRIDGTIKTTTVSKTKSGKYYISFQVEDGRELPLPKPIRNTIGLDVGLNTFVTTSGGEKIDGISPFRESEKRLAVLQRRASRKQKGSQNWKKAMRKVALCHEKIANQRRDFQHKLSRRLVDENDLIAVEDLNVRGMVKNHHLAKSISDAAWSEFSRQLEYKATWAGKTFVKIDRWEPTSKQCSSCGFKNGDMPLSVREWDCPQCGVHHDRDINAAVNIREAGINRLHTNAI

SEQ ID NO: 3751 - protein, 384 aa, unidentified
  REGION 1..384: note = Table 20
MLRAAKFRIYPTAAQEAFLWAQWGAVRKCWNMALFLKKHYYRTRGVSLDLIHEIKPLIARAKKSKKYAWLREYDSMALQESVRNLNKGYRAFFDGRAGFPHYKSRRGPQSSYHCTNVSVGPNYVRVPKMEPIKARIHREVVGKVKSITLEADAAGDYYAAVLWEDGLAEKEPLKEIYEDQVIGIDVGIKDLLTESNGRKEPNPRHLKHARKVLRRRCRQFSRTQKGSRRREKARRRLARAHKRVANARTDNLHKVSSRLVNESQALAAESLRIINMLKNHHLAESIADAAWGELLRMIAYKMKREGKYFILIDTFYPSSKTCSCCGFKLEKLDLATREWTCPHCGAHHDRDGNAAANIRAEGIRILRAEGLPVLRREMSSPNAR

SEQ ID NO: 3752 - protein, 402 aa, unidentified
  REGION 1..402: note = Table 20
MLKAFKIRIHPTEEQARFLNGQFGAVRFVYNKALFITKHYYDKKGVKLNIRKDVKPLLSVAKKHDKYAWLADYDSQALAYAFINLERAYKNFFDGLKKGRNVGFPKFHSRHHVQSSYHIGDRCKVLKGGIKLPKIKEPLKVKCFVPDEIISGEFKLNSVTLTKTCSGKYYASLLIDDGKELPEKIHHIEKAAGVDVGLKDFLIVNDGERCKKYDNKHFIQKADRNLKRKQRKLSRMQGPVYFDADGKKHYREPSKRWLKMKNKVAKIHEHVANRRNDYQHKLSKELIDNYDAVAVEDLNVQGMMKNDKLARAVADVGWSGFIMKLAYKAEWQGKHLVKIDRYFPSSKTCHVCGYKNTDLKLKDRAWICPQCGTEHDRDDNAAQNIRQQGLIKLMASGHTVNK

SEQ ID NO: 3753 - protein, 483 aa, unidentified
  REGION 1..483: note = Table 20
MIYTTGTVSTVSGSAIVKGTDTKFKNNNPAINIGMTILIKSGNTNIPYMIKSVNSDTELVLAQPALVTATNTTFSIHITEPDNNSDAARTMVAINAYTQYFLDAMNTWMSETGQTKIEMPNGEVVTLDSIKKHVYQRHGVNLNPRKDLKPLLAVAKKSHRYGWLKEYDSIALQQAVINLDVAFSNFFNPKLKARFPTFKSKHGKQSSYHCVGIKVIDGAIKIPKIAPIEARLHREITGTLKSITLSRSTTGKYYASLLCDDGMEAPEKPALISNVTGLDMGLTHFAIKSDGYKIANPRPLINASHNLRRKQKALSRKKKGSTNRRKARIQLAAVHERVANARADFQHKLSRAIVDENQAVIVETLKAANMMKNHHLARAIGDAGWSGFITKLEYKAAEKGVHLVKLDQWFASSKTCHFCGHKMPEMPLNKRIWQCPECGIEHDRDINAAINIERKGILELQAAGLVVSAHGGQRKSVTQTVAV

SEQ ID NO: 3754 - protein, 170 aa, unidentified
  REGION 1..170: note = Table 20
KQSSYHCVGVKAGDDWIKVPKLGPIRARVHRRVEGTLKSITLTRTVTGKHYASLLFETEQAAPAPLKDVDAARIVGLDMGLSHLAIDSNGRKIDPWFASSKTCHVCQHKRDAMPLNVRSWECPACHTQHDRDINAALNIKHQGIVKLKAEGLSVSAHGGLRKPGTSPAAA

SEQ ID NO: 3755 - protein, 394 aa, unidentified
  REGION 1..394: note = Table 20
MAYKKNKQQNELRAYKFRIYPTTQQQTELQNNFDAVRYLWNRSLALKSFAYQKFGANIQMSTLKKRIVKLNDRHEWLKGAHSQVKQQSIINLDIAFKNFFNPQLRAKYPQFKSKRNDQSIQYPQGVKIVDGDKLILPKIGKIRLLMHREMESGLIKTVTIKKTKTNKYFASILVDTGIVKDTPVAKVFVDEILGIDTGLIDIVTCSDGFKQTNPKFLKKRLKTIKKEQRKLSRKTNKSSKRRAKQKIKLAKAYEKLTNTRNDFLHKLSTALVSENQVISVETLAIKNLMKNKKLSRAFSDASIGNLYNMLRYKIENKGGHFVKVDRFFASTKTCHVCNHKVEKMPLNIREWACPQCKTIHDRDINAAINIKSEAIKMLRATGTVVLRRGDTVSL

SEQ ID NO: 3756 - protein, 420 aa, unidentified
  REGION 1..420: note = Table 20
MLTATKIRLYPTADQECHLAVQFGCARFVWNRALAMKRAAWQERKESLSCYTIKGMLPVWKGGEFPWLKDADSQVMQEVIRHLDRAYRNFFEKRARLPRFKKKHAARQSIAYPQRVKLEGNLAYLPKVGWVKAVVHREIVGKIKTVTVSRESTGKYYASILADDGLPEIEPLPRIERITGIDLGLKDALVSSAGHKSGNPKPLRRALKNLKRKQQAMSRKIEAAKKRFEAAKAADDGKAYRLRDFFGANIAKDRKRVAVAHERVRHARDDWQHKASRQLADENQAVAAETLNVKGMMKNRRLSRAIADVGWGSLLLKIDYKLKQHGGRLVKIDRWFPSTKTCSCCGAIHEGLTLSDRSWLCTACGSLHDRDENAAENIRRQGILKLKAEGLSVSAHGGGVSRVSSAPATASEVGSLRLQA

SEQ ID NO: 3757 - protein, 390 aa, unidentified
  REGION 1..390: note = Table 20
MNKAYKFRIYPNKKQQQCLAQQFGCIRFVYNNALFYRKELYAADKRHISKYDLIKRLVLLKTEYPWIKEADSQALQQSVMQSDTAFKNFFNKKAGFPRFKNKHSQQSIAYPQRVKVKDNKIYLPKVGWVSIVLHRLYEGTIKTVYVSKAASGKYYASLVCYTSTEPTIIKELDENKVIGIDLGLHDLMVTSHGLATGNPKFLLKAQINLKRKQQKFSRKTKGSSNQSKARLSVAKAHERAAAARNHFQHTWTKRLVDENQAIIVEDLHVKGMLKNRKLSKAISDASWHSLITKLEYKLSWQGKCFKKVDRFYASTKTCNACGTLQEMPLSQRVYSCSCGWKVSRDTNAALNIKKQGIEKLKAAGYTVSARGGLCKTSSEATAYEARSLLL

SEQ ID NO: 3758 - protein, 407 aa, unidentified
  REGION 1..407: note = Table 20
MLHKAIQVRLYPTKNQQIQVASTFGCARWWSNYGQNKSIEVYKKSGKRLRFSGINTLLPSLKKSEASVGLGQYYSQFRQATRLNLTTAYKDFFEEMAGFYKLPCQTKKLLFYYSKNVKFVCILILDYRRITQTKIKKYRLSEGKIQSSIISKKYSGKYLASILTAIKKAENQKTKEGRMAGDLGVKYFAIVPDEEKVSKYDNAKHFAKHKKNGKRQQQKLTDQQKRSNSEYKYRKAVAKVGERFRNSWQYFLYKLSYKLTCDRLAVIVENFYFWNPIRHQKLVKASSDEVLGSFTNFLASKLARKGGNLVEIDRGFSSSKVCSNCFPQMTEMPLDMREGTCPHCATDRDREGNAAIKIKAEGIKILKAEGSAVSALGCEVIPKLKRKSKLRHSPMSTEAPTIFGTTI

SEQ ID NO: 3759 - protein, 401 aa, unidentified
  REGION 1..401: note = Table 20
MLKAYKYRIYPTDEQCTLLAKSFGCVRWFYNFALNLTSETYKETGKGLSRNDIINLLPSLKKEYEWLTEAPSQCLQQVALDLSSAFLNFFEKRAKYPNFKKKGQKQSIRFPQQVKLDGEYLTLPKLGKVYCKVSRLPEGKLKSVTVSLTPSNEYYAACLYDDGKDKPTSSSEGKAIGVDMGIHHYAITSDGNKHGNPKYYRKYEVKLTKKQKQLSRKQKGSNNRNKVRRKVARVHNKITRCREDFLHKLSRKLVDENQVIVVENLAVKNMVKNHNLAKSISDAGWGQFCTMLKYKAEWEGKTYIEVDRFFPSSKTCSNCLHQVDRLNLDIRSWQCPKCQTIHDRDINAAVNIRDEGLRILSQCGLDGLRRRATGVAGGHLATASGQRVRPSKGTAFRGDFG

SEQ ID NO: 3760 - protein, 418 aa, unidentified
  REGION 1..418: note = Table 20
MLFAYCYRVYPTNVQQRSLRRQFGSVRFVYNYFLALQQQRYEDKKKHLSFFDMCRELVELKRNGDYSWLYLTNAQSLYEGLKNLDAAYQNFFQKRAGHPRFKSRRNGHQSMAYTQGSFMDGSHIHIPKLGRVKIRLSRSFRGKIKTVTLKKTPTHKYFVSILVDDGKPVPKPIQELTSVSGVDLGLKDFATVANETETTKHENPRFYTMHLPKLRRAQRSLSRKVKGSHRYRQQRKKVARLHEKVAHARKDYLHKLSTKLVRENQAVIVENLHVHGLVKNRRLAKHISDVAWGEFVRQLAYKCQWTGKHLVKVDRFYPSSKTCSECSVKNEELTLNDRIWTCASCEVELDRDQNAAQNLRAEGIYQLTEMRYIFDNRREDVRLGARSFLALLWSMQQSSMKRAGSAFMPSSEMAQISN

SEQ ID NO: 3761 - protein, 410 aa, unidentified
  REGION 1..410: note = Table 20
MKAFKYRIYPTKSQQEVLESELGAVRWAYNYYLAANRDLRAIKERRMSFVEMTTDLARLKMTDEYRWLTGAYAQSLNQAIKNLMDGYTRHKNGQSRAPVFKSKRDLNQACYYPQGVKFKGRKVHIPKLGLVKIMLDRYCLGKIKTVTLKKTPTNKYFVSILVDDGAEQPKLNKTIPKNKVIGVDVGIKDFAVDSNGNRTANPRHFMKYHARLQTAQKSLSRKQIGSKRRVKQRLKVASIHEKVANCRHDFLHKTSTKMVDENQAVILEKLNVKGMTKNRRLAKHVQDLGLGKYSRLVEYKCAWRGKHFLEIDQWYPSSKTCFECCSVNKDLTLSDRTWECFSCGTILNRDLNAAKNIRREGINVIGQLGVSVLEFSENVEGMSDYYLDLALTNSSLKEALKLSSVVYSAG

SEQ ID NO: 3762 - protein, 464 aa, unidentified
  REGION 1..464: note = Table 20
MISAYQYRIYPSEQQKHNLAIHFGHNRYIWNEALRFIKYHNNGKYTSREKMQLRLTQIKKEITWLPNAHSQTLQATLKRLDIAFQRFFKKQSGYPKTKRRNTEQSIEFPQSSKVDFSLNCVKLPKIGYVRAKLHQKFKGDIKTCYVGKTPSNEYYACFVIDDGLPLPEVNTDVEPTGIDLGIKELVIGSNGKKYGNNKYLKQKLRHLRKAMKTMARRSKKKNKLVTDKEMFGPYSKENPLQSFMQVKEVWSNRREKARLQVARIYRDIVNCRNDYLHKVSRELVDENDGLVFENLNIRGMVRNRRLAQAIMDCAWGKLIQLCEYKSARAGKVCIKIDTFFASSKTCSTCENKYHGLTLNERTWTCEHCGSRHDRDVNAALNISAEGKRLLEQMIKNGDFENQEKPRKSRYGNKKKDSILESVKQSAGLAERGEVVSRESVFANFIEACQEKHPGDAEATSFRAW

SEQ ID NO: 3763 - protein, 377 aa, unidentified
  REGION 1..377: note = Table 20
MLKYYRYELRPTEEQKVQMSQIFGNVRYVYNWALEIKTREYQQTGKSIGCFELMKRLTELKKEKEWLSLSPVHSLQKAITRLDASFSSFFARKSKYPRFKSRRNFKESFQIPDKNHIKINFDNWAVKIPKVKWISFNRDRIFKGVIRQATVSKSATGRYFISILIEDGNIIPEKKEYNEKNSIGIDVGIKSFAVLSDGEVIQNPKYLEKSLKHLRRTQRVLARSQKNSKNREKKRIEVAKAYEKVTHRRNDFLHKLSTSIAKRYIGVCMEDLNIQGMLENRRLARQIGQVGWKTFKTMLKYKLERTGRTLIEIGRFEPSSKTCHACGHIKSDLVLSDRKWVCDSCYAEHNRDLNAAINIKLFGLRTEPFVANATVVA

SEQ ID NO: 3764 - protein, 213 aa, unidentified
  REGION 1..213: note = Table 20
MLRRYQYRLYPTEDQKTLNARHLGCCRFVYNWALARKNQAYHDEGISLSRYDFMNQLPALKAELPWLKDREWTCPDCGTTHDRDLNAATNIKQFTLAGDGSAPSSRCCRFVYNWALARKNQAYHDEGISLSRYDFMNQLPALKAELPWLKDREWTCPDCGTTHDRDLNAATNIKQFTLAGDGSAPSSLWTRSRWGGDETGSPLAQVGGSSRNT

SEQ ID NO: 3765 - protein, 548 aa, unidentified
  REGION 1..548: note = Table 20
MLRYRYRLYPTEDQKTLIAQHLGCCRFVYNWALARKNQAYHDEGISLSKYDLMKQLPALKAELPWLKEVNAQSLQQSIHHLFRAFTNFFEGRAEAPTFKAKHAPEQAFTVPQSYTVDFERGTVKLPKIGAIKVKYHRTFVGTMKSATVIRTSTGRYFLSIVVEDGRKPPKPADPVPDQTVGIDLGLAHYAVLSTGEKVGNPKYLRNAQQRLAALQRRLARKKKGSKNRNKARLKVARCHQEIADQRRDFQHQLSSRLVRENQALAVESLNVDGMVKNHNLARAISDAGWSTFLSMLAYKCQEAGKTLLKIGVFEPSSKTCSVCGYRKADLTLKDREWTCPDCGTTHDRDLNAAINIRNFAFSGAGRAVEPVDPLPVGRGMIAGKPPAQAGGSSRAANRGLTALRPGNHYIPWAPVGAHGASNRNHGILPGERHQGGANVSPKVTTTPPPRAAGSVTVAIAAEKMAFDTGTITVPAGAEVTINFENRDNGIPHNVAVYTDPSAAKEIFVGDIIAGPERATYVFTAPETPGTYFFRCDVHPFMNGAFIVE

SEQ ID NO: 3766 - protein, 394 aa, unidentified
  REGION 1..394: note = Table 20
MKAVKFKEYSLTKIIYFFKLYYSRMLKAYKYRVYPNKDQKRLIKVHFGACRFVYNWALEQKIKTYEQYNKSISRFDLQRILVHEVKPANEWLKEANSQSLLACLVNVESAFTRFFREKKGFPRFKSKKNPVQSYQMPQHYTVDFEKSLVKLPKIGEVKAILHRRFEGTLKTATISKTCTGKYYLSILVEDGKELPVKQEFSESTTVGIDVGIKDFAVLSTGEKVENPKYLKNSLIRLKVLQKRVSRKVKGSKNREKAKLLLSKLHEKISNQRNDFQHKLSSKLISENQAIALETLNKGMQKNHCLAQALIDSAWSSFVTKLEYKADWFGKTILRIGRFEPSSKLCSVCGYYNSNLTLDAREWECPDCKTKHDRDINAAINIKKFSLQDQNLIVI

SEQ ID NO: 3767 - protein, 381 aa, unidentified
  REGION 1..381: note = Table 20
MIRSYRYRLKPNVAQKMFFIKTFGCVRYIYNWALSKRIESFQNNNDDISWKDMSSMLTSLKKESDKLWLNDVSAECLQQSLIDLNSAYTNFFRRKKGFPNFKSKRNCNHYRAINSVVVDQDKCKIRLPKIGWVNFFSNRKYVGKFKSVTISMTPTMKFFISINVDDGKDVIDKPEISYDTSVGIDVGIKNFAVTSNGDVINNPKFLEKSIGRIKVLQKRLNRKTKGSNNYVKSRIKLAKEYEKITNRRNDFLHKISTNIVRENQTIIVEDLNISGLMKNHNMAKSILSASWYSFFKMLEYKCGWYGKNFITIGRFDPSSKMCECGYINDELKLSDRLWSCPNCGIVNDRDFLAAKNIKKFGLQRRNLIGYSPRVAGVELVE

SEQ ID NO: 3768 - protein, 399 aa, unidentified
  REGION 1..399: note = Table 20
MIRGFRYRIYPNKEQVQQLNQMLGNARFVYNWALDRRIKEYQSEKKSISAFTLMTELTQLKKQEQYDWLNLSVAQSLQQSVVNMDKAFTRFFKQKKGFPKFKSKHIGTHHVGFPQNTKVDFEASKVSLPKLGWVKTKISREFDGNIKTSTIEKTPTNKFFISITVELPDVEVKQKPISKKKAVGIDTGIKTFATLSDGAEIENPKHLKNSIQRLKVLQRRASKKQKGSSNRRKANLKVALLHEKISNQRLDFLHKTTTAIAKQYDTVACENLNISGMMRNHKLAQSIADLGLGRFYTLMQYKMQEQGGNYLEIGRFEPSSKMCGCGVINKELKLSDRTWTCESCGSINDRDILAANNILKFALNPKNKTTDGMSGIAYGDAGVSQVDEVGTVDGRSLRP

SEQ ID NO: 3769 - protein, 385 aa, unidentified
  REGION 1..385: note = Table 20
MLKAFKYRIYPNSSQQEELARAFGSCRFLYNKALEYKKLIYESEKKSVSYNDLATVFFKDLKEEFDWLKETPSQALQQSLKHLDSAYQNFFKKQSKFPSFKRKFSRQSFSIPQFVKVNFKDSIIRLPKIGNIKTVFHRTFEGIIKTCTVSKTPTNKYYISILVDDNKELPNKVTGDKAIGIDLGIKSFATFSNGEKVDNPKFYDRSLNKLKALQTSLSRKIKGSANYRKLKLKLAILHEKICNRRDNFLHQLSKKIINDNQVIITEDLAVQTLMEKSYSSMSRNIGDVSWSKFVTMLKYKAEWNGKRLVQIGRYDPSSKKCSGCGNIYYDLKLEERTWICDKCGKEHDRDVNAAVNILQFGMEQAELKCLDARRAERKPTGSSCG

SEQ ID NO: 3770 - protein, 384 aa, unidentified
  REGION 1..384: note = Table 20
MLKTYEYRLYPNIAQEAKIQQHFGCTRYVYNKALELKISTYEKDKTNLSKYDLAKLVTQWKTQDDTLWLKEVNAQALQQSIFHLDNAYKNFFREKRGFPKFKSKHNHRQAYSLPQGIKINFDNHKIYVPKVGWVNAKIDRTFEGIIRTCTVKQVPSGKYFISVLFEDDTQDKPLKAITRDTTIGIDLGVKDFCTLSTGEKVSNPKVLSKYLSKLAIEQQKLSRKQKGSRNREKQRVKVARVHEKISNIRKDFLHKLSTRLTNDSQISALCLETLNIKEMLQNRALARSISDVSWYSFVQMLEYKAKRNGVNILRIGQYEPSSKLCTCGYINHGLKLSDRVWTCPKCGATHDRDILASNNIKDIALSNTNLDYHFSGLGKSEVLV

SEQ ID NO: 3771 - protein, 417 aa, unidentified
  REGION 1..417: note = Table 20
MLISFYYFFLLILFVNLKIISTFALMNYLGFKYKILPTAGQVELLEQHFGSARFIYNYFLDLKSKTYDESKVNLSRFDLQKLIPGLKEENPWLKLVNAQTLQKALLDLDTAYKNFYAKRGKFPKFKSKRSPYSRFNVPQNVRLEGETLFIPKFREGIKVILHRPIKGIIKNATIERNPLGEFFVSILCEIDSPTLVKPEIEEDTTLGIDLGISSYLTTSKGEKIENPKYLSKSQSKLSYAQRRYSKTKGRKAKRKLNKIHTKVKNQRLDFLHKLSNKLLSDSENQTICIEKLNIEGMLKNNPLAKHISDAGWAMFINMLTYKAKLRGKNILQVDTFYPSSKLCHKCNYKNDNLKLNQRAWQCPNCKSNLDRDLNAALNIKNKALEEHRVKIKDSCLNKNLKSNLEDSLEAVTLGASI

SEQ ID NO: 3772 - protein, 374 aa, unidentified
  REGION 1..374: note = Table 20
MKMNIAYNFRLYPNKENQVLLSKHFGSARFIYNIMLEFKQYYFNKTGINLNHAELCKALTHLKKLDEYSWLNEVNAQMLQSSIKNLDRAFTNFFEGRASYPKFKSKKTHKFSFNIPQAISLINQNRLKIPKFKEGIKVKLHREIIGTIKNATIKLNPSGKYYVSLIAQYDNQIPAKPKVEHSSATGVDLGIKTYATLSDGTKIFYPLYLEKNLVKLKELQAKFSKSKSKRVRLDIAKLYEKITNQRLDFIHKLTKELVTNFKSIAIEDLDITGMLQGHPSLARRISDCSWYTFRQTLTYKANLYGCNLIVIPKYYPSSKSCSSCGSINNNLKLTDRIWLCPNPKCELHEKGLDRDHNAAINIFKQGFGTNPVTP

SEQ ID NO: 3773 - protein, 428 aa, unidentified
  REGION 1..428: note = Table 20
MLTAYKFRLYPNEEQQVLFSKYFGCNRVVWNKALALKEEYYKEHKNNTAKKGLNYYDTARFLTSLKKKEEYKWLKEVNSQSLQQSLIDLDKAFKNFFKGVAKYPNYKKKSNKQSFRVPQFFNFDDSVLYLPKFGKGIKMKEHREFPREKVKQVTISKVPSGKYFVSILVSDSRKAPKKAAVKDNSKTIGIDVGIKDSVVLSNGIKIDNPKYLKKSEKLLKLRQKQLSRKKLGSNNFHKSRIKVAKIHERITNQRHDFLHKVSDAITKHFDTIAVETLNIGGMKKNHRTAKAISDVGIGNFFRFLKYKAENRGKNILEIGMFDPSSKMCHYCRHINEKLTLSEREWECPNCHAWLDRDLNAAINIRDFGLEEAGIKLRKPRNQGLIPSVRGKSKPVENPLTAELIKMKIKFRSTSHGPEKQEALWLAVG

SEQ ID NO: 3774 - protein, 380 aa, unidentified
  REGION 1..380: note = Table 20
MFTAYKFRIYPDDEQKLLIEKHIGSCRFVWNHFLDFRNKRYVETGKGMSYRDMSVLLPALKEEKEWLNDVSSQSLQQELMHLDSAFHGFFKKIGKYPAFKKKKNGGSFSVPQHFTINGNHLAIPKFKNPLRLFMHRNIEGEMRSLTISKAPSGKYYASILAETGIKIAEPLKIEAGRSTGIDVGITAFLTTSDGMQIHNPKNLKKSEKKLAILQKRFSRKQKGSKNRNRAGVEVAKAQEHIANQRMDFHNKVLDAMLKAYDTVITEDLNVSGMMKNHHLARSIADAGWSSFVTMLKTKALSRGKNIIETGRFDPSSRMCSNCGNIKHDLKLWDRTYNCDICGLSIDRDLNAAINIKKFGLIQTGIHTDSGEYTPMEISLV

SEQ ID NO: 3775 - protein, 363 aa, unidentified
  REGION 1..363: note = Table 20
MRFGEGRFGRIKLPKVGEVRCALHRRFDESLWAIKTVTVTMEPSGKYYITVLTENKKAVLPMKTTVREEATSGADVGIEHAFVMRTPTKTVVVDNPRHLQKHLDSLAVKQKILARKEVTFTEVTLPSGRTVKQKLPSKGYSKQQKLIAEEHEDIRHARRNFLEVTTTRVADDKQATTLVVETLNLKGILRNHCLARALADVGIGMLFRMLEYKFDRRGENVLRADRWYPSSKRCPVCGKVNADLKLKDRRWVCPHCGAVHASRDETAAINLRRYPFLSEEEKVLLARKDVGKAEQAADPLRAVSQETDLKTELRREPGTDDNQASAFEGSREGCFNRATGKTETSPKGLKHTAAVGSQEASSF

SEQ ID NO: 3776 - protein, 412 aa, unidentified
  REGION 1..412: note = Table 20
MSYVSYRFRIYPNSLQRQSLVDHFGCTRWVFNRYLSEADDCYKQTGKAMRCNDFIVRLVKLKKEYPWPKEVNSQSLQMAARNADRAFVNFFEKRAQPPRFKSKHSGRQSFHCPQNCKVLFPQIGSKGHIVLPKIGPVKAILHRRFNGTVKTVTVVREASGKYFASVLVDNAQPKVTPDTVDFERTAGIDAGIKTAFTVVSQSGTEKIDNPTFLKKHSEQLKKQQKRLARCLRIVNVKKNEKGEKVKEVTVSKRYEKVRKELARTHERIRHSRKNWIDQITHRLVIDSQVTTYVIEDLDLKGMVKNHHLARAVSDVGIGNFYRTLQYKLEAVGKNLIVAGRWYPSSKRCPECGTKKESLTLKEREWRCAQCGHEHDRDEAAARNLRHWVRLSESDKHRYGRNGRALEKEAIPF

SEQ ID NO: 3777 - protein, 422 aa, unidentified
  REGION 1..422: note = Table 20
MVSTCSVMTLKAYQYSISPNSEQQAQIWQHFNHNRGVWNRMLALKSRYYKVYGKSLSKRQLQDHLIKLKKRPAFAWLKQVNSQSLLATLNNLDTAYGNFFKGIAKFPRFKSKRSNWHSYANPQHTEVDFENGKVKLPKIGWVKAKLHREFVGNIKTSTVKISPSGKFTVSILVDDGKVLPDATTIEPEYAIGIDLGIKDFVITSRGKTYENKRLLDKQLHQLNKQQRILSRKKKGSASRNKQRIRVAKLHEHVANSRKDYAHKVSAELVSESQTTIFCEDLAVKNLLRNKKLSRHIANVGWSQFLEFLSYKMKESSKNLIRINRFKPSSRECRMCHSKHENLKLSDRTFECPYCGHTEDRDIHAAKNILRFGLEQELGSGSESSHAVKSTPESILDLTSGSAKGLEPALVGSAEAPSRTSVS

SEQ ID NO: 3778 - protein, 420 aa, unidentified
  REGION 1..420: note = Table 20
MITHSFFGTNIAVLYHMLNTYQFRAYPNTGHKDFFAQHFGCTRKVYNHFLGEHEQDYKDSQKPWNFYEYKRELPALKEQFPFLKEVNSQSLQAAVQNLDRAYKSFFARRTKHPRFKSKHHKQSFCVPQNTKVDFERGLVFIPKLKTGIKCKFHRRFEGTIKQATIAKTQNGEYYISITVEEPDMAQKMQHTLDEAKAIGIDVGLLSFLTLSDGTKVDNPRWLKQSEKKLARLHRKLSKKIKGSKNRNKQRLKVAKQHQKVSNQRKDFQHKLSRKIVDDNQVGMIFVEDLNVRGLLKNRKLAKHISSVAWGQFLRFLEYKAHRAGKFFGKIGRFEPSSKMCHVCGHINHDLDLSERTWQCPHCLSVLDRDINAAINIRNIGLHTAGIAEIHACREETPTVEPSVLQQVTSLKQEARHFNGE

SEQ ID NO: 3779 - protein, 370 aa, unidentified
  REGION 1..370: note = Table 20
MLKAYKYRLYPTADQAEFFSKSFGCCRVAYNRTLDYMSLLWCGAGVSVSRFGAQEQLISLKEIYPWFGEVNSQSLQYAVKQVADAFKNWWEHRAGHPLLKRKKDRQSFHNPQNCSVDWKHKTLSIPKCKDIPIVLHRSFYGKIKDVTISMNPDGKYYASILVDTAITAKPCSVVEETTTVGIDTGVKTFAVCSDGREFDTPHFAKAAEKRLKHYQRELRHKTKGSSGWKRVQHHIARIHAKVANQRLDYIHKVTHQLTHDSQVRTICIEDLNVKGMLRNRHLAYSIADASIGRFYSILEYKCRWEGVNLIRIGRWDASSRTCSACGEVNRRLKLSDRTWTCMSCGSVHDRDHNASGNIKSFGLRMALPSD

SEQ ID NO: 3780 - protein, 388 aa, unidentified
  REGION 1..388: note = Table 20
MLKAYKYRLYPTKEQAAQIDRSIGVCRLVFNLALEVKTWAHRNGTTLSAFDLCYQLVDLRDTFEWIREVNSQALQAAVKKVDVAFKNFFHGGGFPRFKRKRNGGSFQCPANTRKIDWEKATLTIPKIKDIPIVLSRRFEGKIKTVTISKTATGKYFAAVLVELLQEEIMPAKTEQAIGIDLGLAHFAVLSNGEKIDNPRSLTKMLARIKVLQRRASRKKKGSQNSRKANRRVAVLHEKIANQRNDFLHKVSTRLIGDNQTDTICVESLRVRNMVKNHRLSRAIVDVGWSKFIAMLEYKGRWYGKKVIRIDQWFPSSKTCSYCGHILTELDLSVREWTCASCQATHDRDVNAARNILAKGIESGVGSPAEPVEPRRMRRTRKQESIPQG

SEQ ID NO: 3781 - protein, 416 aa, unidentified
  REGION 1..416: note = Table 20
MIALVIMLKTYSYRLYPEESQIQSLARTFGSVRFVYNKLLEMRIKAYQRRKESLSCFECNKRIRSILKKAYPWLGEVNSQALQMASRNLDTAYKNFFQRKEAGFPRFRKRSERQSFQCPQNCKVDFQKQELYVPKVGLVPCVFHRRFKGEIRTVTIVKEPSGKYFARVLVETTAVPYPVEKPILRETTVGIDLGIKTLAVCSNGMEFPNHKHLAESEKKLARLQRDLGRKAKGSRNRAKARIRVARIHEKIANQRKDTIEKATSMIVDDNQVDAVCMEDLNVKGMVRNRKLAGSISDASFGFFRMRMEQKCRERGKSFVLAPRFYASSKTCNTCKTRYMNLPLSVREWICPSCGKLVERDRNASLNLRDWACTRGLRESNVCGDEHGGRPLFEPKKPDIVEAEIVLGNAFQEAPCL

SEQ ID NO: 3782 - protein, 413 aa, unidentified
  REGION 1..413: note = Table 20
MKTYRYRLYPTEEQESLMSRTFGCVRLVYNHLLDFRTKAYKRRKETADYYKCNEFLMKLKEVFPFLKDVNSQSLQSANRNLDAAFRNFFGKPGKVGYPKFKKRNGRQSFQCPQNVKADHTTQSVYLPRIGWVPCVFHRRFEGRIKTVTVTQEPSGRYFASISAETPPELPKPERKVESADDVIGIDVGITTYAVCSDNTEYENPRHLSKYERRMKRLQKSVSRKKKGSKNRKKAGRKLARCHEKIADKRKDNAEKISADIAGKNQAAVAVEDLNIKGMTRNHHLAKSINDASWGYFTMRLKTKCERNGMRFVKVPRFFASSQTCSACGYKNPEVKDLSVRNWICPVCGMEHDRDRTASINIQKKGYELSVPVDGGEFKPVETVTVDDRAKAPKKHTVDEAGIVLELPQEAPCL

SEQ ID NO: 3783 - protein, 433 aa, unidentified
  REGION 1..433: note = Table 20
MVVSAEMPIFVGNMTKEVRHDNSCRFRLYPNKEQRELIAKTFGCCRWVYNWGLAMRKKAWEEEKKSLSLTDIQSQLPAMKKDAATSWLKEVDAKALIFSLRCMDTAYQNFFKHQSGFPRFKAKYDRNQSYQTYQDVSFSYDKSKLYLPKMQEGIKCIFSRKIEGKIKTCTISRNPAGEYYVSIIVETEGSYPEPPAIKPETAVGIDAGVKNLAILSDGQKYPASDKFRKSERHLAHLQRILSRRTKGGKNWEKARVKVARAQNRIRNQRNDLINNVVADIIKKGYETICVENLSIKDGMLQDKKHGKHNKQKRSRNKLIVDAAMGMLRIKLQQKCKSKGINFIKIERYFPSSKTCHCCGKIFKGLQLSQRSWVCPSCRAKLDRDVNAAINIKNFGISNSSLGRCTPEVKSVEHRKQKRKNAKSSDVSDVEKQK

SEQ ID NO: 3784 - protein, 401 aa, unidentified
  REGION 1..401: note = Table 20
MVLKAYKYRLYPTKEQAELIERHFGCCRFVWNYFLSLRKETWDKEKKHLSFYEIKKLLPELKKQNPWLKEVNSQSLQEVVIELERSYQRFFKGICNFPLFKKKKKSQSFSIPQHFRIESDRVYLPKFKTGIKFKKHREFTGLPKRLYITRTPSGKYFLLVVCETEINVLPENKYIAGVDLGIKNFVTIARVNKDNTLIKTEKVPHPKTLQKYEKRIKRLQRQLSRKQKGSKNRQKARIKLAKIWEKAKNVKYDYLHKLSSRLINENQVICLEDLNIKGMIKNRKLSKNIWDSAWYEFIRQLRYKAMWYGRKIATIPLFYPSSKTCSNCGWIFSDMDLSVREWECPCCGAKHDRDINASINVVKVGMEQPEFMPVEETTRVFSMRRQVVPVKQEAMHGISIP

SEQ ID NO: 3785 - protein, 406 aa, unidentified
  REGION 1..406: note = Table 20
MFLAKQFGGVRFIYNYLLSRSNEIYEKEKKTIHINDLKKEIPQLKSAKKWLKEINSQSLQEAALNLGKSRDRFFKKQNGRPRFKRKNSKQSCTIPQHFSIKKSKMDNKFLYIPKLKSGIKIKMHRELVGESKRIVITKTYTGKYFASITYDVKREDIPKPKTMGEARGKIGIDLGITSFVTTSNGEKILYPRFMKTSLKKMARASKSLARKKKGSNNREKSKLKLAKIHEKIANKRSSFVHETSFALINENQVIYAEDLHVKGMMRNHCLARSIADTAMGEFIRQIKYKAEWRGRTFVQIGRFEPSSKMCNTCKTVNKELKLQHRTWRCKLCGSMHDRDINAAINILKIGQNVSRTRASLGKGRPEVKPVERSTKVFSSNKKKQVGSMKQEPISNLRIGMHGNLLP

SEQ ID NO: 3786 - protein, 406 aa, unidentified
  REGION 1..406: note = Table 20
MFDKYIYINYNRNMQSYKFRLQPNKEQREKLDNMFGCSRFTWNYFLDLNNKIYLEAKEKDLKKKHLNYYDCANKLTGLKKENEWLKEANSQALQQTLKDLDTAYNRFFQKKSGFPKFKSKKNNQSFRVPQFFELKGNHSCFPKFKKGIKTIIHREVLGNVKYATISKTKTDKYFVSITTDFEEKKKRISNNSAGLDLGIKDLVVVSDGQKYSLKINEGNIKFLHKQISKKKKGSKNRKKAILKLAKRYEKFGNVKQDFQHKLSDKLCKENKLIAIEDLNIKGMLKNHCLAKSISNQSWYWLIKKIEYKSKRYGGEVVKTKRFYPSSKTCNHCGYINQDLELKDREWECPKCKTILDRDINASKNILAQVLRELNLKGEGSTRLKPAELSSIDEAVKQEAFGSLVQR

SEQ ID NO: 3787 - protein, 413 aa, unidentified
  REGION 1..413: note = Table 20
MNHLYSYKFRLHPTKQQEVLLNKHFGCGRFVYNHFLDKRIQEYKNNKKSISRKDNEKELPILKKEHPWLKEVGSQSLQYAVECLQNAYDNFFRKVKQKNKGNKGFPKFKRINDKQSFRVKQNIKIKGKKLCFPKFLSGVNFVQDREFEGEIKFATISRNKVGQYFVSITVQKEILPLPTSSEVIAFDLNVKNIVDSNGNKIQNPRPNKQYEQRLKLLSKGVSRSEKGSNGRKKANRRLAKLHLKITNKREDFLHKLTHRIINENQVICVEDLSVESMLKKVSPDKRDETRWKERNRHKDIADCGFRSFVDKLTYKAKWCGRELIKVDRYFPSSQLCNNCGFQNKELKPTDREWFCFNCFENVDRDHNAALNILDEGLKYRTVGTTELAACPDVRPAFGGQLVGAETHPSLAGG

SEQ ID NO: 3788 - protein, 449 aa, unidentified
  REGION 1..449: note = Table 20
MFRTVCTDAVCFGGPISEVFCECSPISMGTFTKSAGVSINYTILAQVKTIYRTFQFELQPTQEQKVLLDKHFGCIRYVFNHFLNERKEQYQAGNKSDNYYAQAAALTELKKQEETSWLKEVNSQSLQFALRCLDTAYVNFFRGNAKFPRFKSRKKKNTFTVPQFAKLRDGRFYAPKFKEGIKVTVHREVKGEIGKCILSKTPTGKYFVSILSEEQYQPKEKTGAVCGIDLGLKDFAVTSDGIRFKNNKYTKHYERKLAKAQEHLSRKTKGSNSFEKQRRKTALIHGKITNSRMDNLHQVSHKLVSDFDLIALEDLDVKGMVKNPKLAKHISDASWGTFVRFLEYKADWNDRQIVKINRWYPSSKTCCECGWINQDLNLSIREWTCKNGHVLDRDLNAAKNILKEGLKIYGQGLSITRVERKSDFGNKAHAMKPEAHPIAFGVGGQFTIA

SEQ ID NO: 3789 - protein, 328 aa, unidentified
  REGION 1..328: note = Table 20
KETNAQSLQFALKCLEGAYGKFFDRKAKFPKFKCKNSKQSFCVPQDINIKNSKLYISKFREGIKIIAHRSIEGKIKHATISKNKAGQYFACICVERNIKKLPKVKSKIGVDLGVKTLATCSNGKSFRKFAFKETLTKRLVKLQQWFARTTKGTKLHEKIRNKIAKLWQKLKNSREDYLHKVSRKIIDENQVIILEDLNVNGMLKNHCIAKGVQNSCLSELVRQIKYKANWYGRTVAQISRWFPSSKTCNNCGYIKQDLMLESRKWICPRCNSWHDRDLNAAKNICKQGANMLNRRGYGDGLGTGGKTSSVVAKSFKKHSRMKQETPKN

SEQ ID NO: 3790 - protein, 469 aa, unidentified
  REGION 1..469: note = Table 20
MKPPKLNHSDLWAVKYRIYPNRDQRRRLDKSFAGVRYVYNYFLERRIKYYEEHKNDDGKKGLNFYDTTKELTKLKRKETWLYDVSNEALQKSLLDLNTAYKNFFKKNARFPRFKSRYDKQSIWTSHWSGIKIENGKVYFTKFRDGIEIRQHREIKGEIRSAVISKSKTGKYYISITCNTDIEPLPETEGEIGIDVGVKTFATCSNGDRYENQRVFNKYLRKLQYEYRQLSKKKKGSRHFREQKLRVAKLHEKIANIRNDYLHKITWEIVSNNQFIAVEDLDIKNMVSRDRKDKKNMYNKQKQAIARSILDCGWGEFFRQLEYKSKWYGRKFVKIPRYEKSSKTCSICGNIKEDLSIDDRYWICNNCGSVLDRDWNASRNILQTALSGCKPQSDIKQKDLEAPAAAGSVKGQPQAYGEVAADDLVLLAKLLGGVEEEKGVDELDKKISKLVSVWYELISDYRKERDCHFT

SEQ ID NO: 3791 - protein, 187 aa, unidentified
  REGION 1..187: note = Table 20
MDAEPYNKTGKSVGIDSGIKKLAVRSDGSSYKNIGSLKANLKKLRFGQRQLSKKTKGSRSRGRQKQKLAAVHEQLTDIRKDYLHKVSTEIVKNHDILSVEDLAVKNIMKNHCLAQAMGDVSLGAFYSMLEYKANWNDRAFVKIDRWFPSSKSCSTCGWIKQDLTLSIRAWVCGSCGEIHDRDVNAAK

SEQ ID NO: 3792 - protein, 402 aa, unidentified
  REGION 1..402: note = Table 20
MKSTHLKAYKFRIYPEGEQINFLARQFGCCRFVYNYALELRQKTYEETGKSLSYYDTTKMLPVLKSRQETGWLGEVIAQPLQMAMQNVEDSYKRFFKGQNRYPRFRCRSDRQCFKLPQGFRVEGDLLWLPKLKTGIRIKISRQIKGKILYLHLSRTTTGNYYVSFTCEVPREILAGTGKDTGVDVGVKDAAILSDGTRYENIKPLKKLEKKLKHRQKQLSKKQKGSQSRKRQRRIVARLHERIKNLREDHLHKITTDIVKNHDTVAVEDIAVKNMLKNHCLAKSLSDASLGKLLTQLAYKCDWYGRKFVKVDRFFPSSKTCHVCGEKKEDLTLADRAWTCSCCHTTHDRDVNAARNILREGLKILSGCGAQSDTKQKQAEASPLGESVKPEAKAKQKEKPDA

SEQ ID NO: 3793 - protein, 353 aa, unidentified
  REGION 1..353: note = Table 20
MHYTYKFRLDPNLLTIIFLNKLIGSCRFVFNKLLEIAINEKLYSYYELKKRIVNLKKEYPFLKEANSQSLQAASLNLKKAFDNFFKKRSDFPSFKSKRENNSIIIPQFFKIEDNKLKIPKLKISIPIILHRGIIGNIKSISITRTSSGKYYLNILVEKEIEKLPLTKNAIALDVGLITFAKLSNGEEIQNFRFYKNSEKNLKKLQKRISRKQKGSKNRTKAIIKVAKIHEKTKNKRNNFLHKESLKIIRDNQTIIMEDLKVKNMIRNKNLSKSIQDASWAEFKRMIKYKAIWHGREYIEIDQFYPSSKKCCICGYKNINLDLKTREWICPKCNTFHDRDYNASVLQLKLCLVA

SEQ ID NO: 3794 - protein, 423 aa, unidentified
  REGION 1..423: note = Table 20
MTKQYTYKFRIYPNRDQITFLDEQIGCNRFIYNFFLERTVNLFKVHNIKFNYYESKKIIPLLKKGFPFLLNANSQSLQATLKNLDTAFKNLFQHRAKFPNFKKKVNTNSIEIPQHFTVKDNFLHIPKLKSAIKIKLHRRFYEFAKSVKITKTPSGKYYVNILVEKYDYTPYMPDKVKNIVSGADLGIKDFAVITTGKSIADKQTIKINNPKYLIKSQEKLIKQSRQLSKKQHKKTKNDKTKASNNYKKYSKKLTKLHEHIGNQRKDFLHKLSSRAVNDSQVIVLEDLNIKGMVKNRHLSKSISDVSWGMFTGQLKYKADWYGRDIIKVNRFYPSSKTCSVPACGYIKQDLKLSDRFWTCPECNTTHDRDINASINLFLEGLNLTIRPEWSELTPAEYAPAGIQSIGYSHHTMKQEEAYQLIDR

SEQ ID NO: 3795 - protein, 436 aa, unidentified
  REGION 1..436: note = Table 20
MQDKDKELFFLNAIKFRIYPNAQQKELISKHFGCSRVVYNYFLDYRQKQYAKGIKETYFTMQKVLTQIKRQEKYHYLNECNSQSLQMALRQLVSAYDNFFSKRARYPKFKSKKNAKQSFAIPQNIEIKTETQTIALPKFKEGIKAKLHRDLPKDSVIKQAFISCIADQYFCSLSYETKEPIPKPTIIKKAVGLDMGLRTLIVTSDKIEYPHIRFYQKLEKKLKQAQRRLSKKVKGSNNRKKQAKKVARLHLACSNTRDDYLHKISNEITNQYDLIGVENLNVKGLMRTYHSKSLANASWGKFLIMLEYKAQRKGKTLLGIDRFFPSSQLCSYCGFNTGKKHEGIIQFTCPHCKTTHHRDYNASVNIRNYALGMLDERHKIKIDKARVGIIRSDYTHHTNECVKACGASSNGVSSKYGNILDLASYGAMKQEKAQSL

SEQ ID NO: 3796 - protein, 409 aa, unidentified
  REGION 1..409: note = Table 20
MQKTILRAYKYRIYPNKEQVKFLENHFGACRFVYNCFWGKYKDTKLPNKTLLQKELKELKKNENYSWLNQINSQSLQVSIHNLIKAYKRAFSKEVVKERKIALARANTPKQKAKALKLGFPKFKSKKNNYQSFNIPQNVKIKENKVYIPKLKEGIKVKFHRPLSQNGKIKQATISRKNGKYFISILIEEVIKIAKKPFKAIGIDMGLEHFIILSNGEKISNPRWFRKTEQRLKILQKRLSRKVLHSRNWYKLKAKISKFHEKILNQRNDFLHKVSIAIAKQYLLIAIENLSVKNMQKNHYLAKSISDVSWSKFVEFLKYKSEWYGAKLIQIDKFFPSSKTCNICGYKIDKLPLSKRKWTCPYCNTTHDRDINASINILKTALSGMEQPVEPVEVCQKATVEAGSPDYNL

SEQ ID NO: 3797 - protein, 393 aa, unidentified
  REGION 1..393: note = Table 20
MVKTINKAFSFRLYPTTEQEKILASCFGQARFVYNYFLRKRIDYYASNKGKEKQNLNYHDTAKMLTELKQQSDTLWLKESNSQSLQQSLRHLDNAYNNFFNHKFKFPNFKKKSNKQSFSVPQNFNIDTRTKQLHIPKLSPLKIVLHREIEGDMKNVTVSKTPSGKYFASVLCEIGKVIKPKKKGGEIGIDLGLKFFLVTSDGKTVDSPKYLRKSENKLNQLQRHLSCKVKGSNRRNKARIKVARIHEKISNQRNDFLHKLSHRLVAENQSIFAEDLHVKGIMANHHLSKSVADSGWSEFVRQLNYKSKWNGVYFGQIDRFFPSSKRCHACGWINQSLTLKDREWICQGCGQVIQRDVNAAQNILQFGQLNMVGREPSKPSKRSGRGGVVMPLV

SEQ ID NO: 3798 - protein, 400 aa, unidentified
  REGION 1..400: note = Table 20
MEMKVVHKAFKFRIYPSAGQEKLLSVQFGHARFVYNYFLAARNAYYLEHKADEKKILSYKETSKLLTALKKTDDHIWLKEADSQVLQSALKNLDRAFANFYAGRAKYPRFKKKSKVQSCHFPQRFVVDPAARSIRVPKIGQLKTVLHREQQGRALGVTVSKTASGKYFAAITCEVEIMVPARKQAEIGVDPSLGSFAILSDGRVIENPRHRKKAEVRLGRLQRKMARQLRGSASREKTRLLFARQSERMANQRKDFLHKLSHELAGAYGLIGIAKLSATDLLKNHKRDGGADVGWGEFKRQLEYKAEWNGGQVRQVGMHEALIIECPRCGLVNHELTLSDRERPCPGCGVAYEWDLHAARLILEQARAGAAQRNAGGEYVSPVAALQLPANLYETGSRLH

SEQ ID NO: 3799 - protein, 500 aa, unidentified
  REGION 1..500: note = Table 20
MIVVGQKLGKLEVVGLTAKRGVQCVCACGVKKTFPKRFSKRLLSGAISSCGCDLTRIGYRFRIYPNEIQKHELAIQFGQARFVYNHFLTLKKEAWFQHGLTLSKEDMQVILKELKQTEQHSWLNQGDSQVLQGALDQLDTAYRNFFRMKREGTLPAGNGKPRKDGMPKGYPHYHSKHDEQSITYPQRFKVTGSRIYLPKVGQVRAVFHRPMEGEMKNCTVTKTKSGKYFISIQCEVKRPAPEFGGKPPVGIDVGLRRFATLSRPLPDGRTVIEHPNHLRKAEKKLKRLQRQLSRRKQGSKNRAKARLALARQHEKVANQRKDFLHKASRQVVAAFGHIGLETLNITGMVRNHRLAKSIADSGWGMFAEFIVYKGQWYGSYVERFDRFYPSSRLCSTPGCGYINRDLKQGQSSWTCPDCGKQHDRDDNASNNLEPSPTVGATGRAALVTATPDREGRLQGESLVPLVEAGTPASRLGSSLRHCLALAQAGINPSTGDTYPT

SEQ ID NO: 3800 - protein, 372 aa, unidentified
  REGION 1..372: note = Table 20
MADSNKTHRAFRYRIYPNTEQQQVLAVQFGHARFVYNWGLATRKAYYHQHGTGIDHYALKRQLTQLKHTPGFEWLGEADSQVLQAKLDDLDRAYQNFFEKRAGYPRFKSRKGEQKIRYPQRFKFDGNRIYLPKVGWVKAVFHRPLTGTPKTVTVTKTKSGNYFVSVQCEMETDSRPQGQGEIGIDLGLKHFAVLSSGEKIESPQYLRQSEAKLKRLQRQLSRKQKGSANREKARLKLARQVEHVANQRKDFLDKLSHDLAKQYHTIKIENLNVCGMLKNHKLAKSISDSGWGMFGRMLAYKAADCQKIDRFYPSSKTCSVCGFRNKQLQLQHRFWRCPACKTEHDRDINAAINILNQPTAGAAGRQTPVESV

SEQ ID NO: 3801 - protein, 380 aa, unidentified
  REGION 1..380: note = Table 20
MLINKAYKFRIYPNQEQEQCFAHHFGCVRFVYNRMLALFKETRQFNKNQYKVMLPDLKRQFAWLTYPNSQSLQSAVDNLASAIARWGKGLGGFPVFKKKHLKNSFEVPQNWFVDEAGKLHIPKLASGIKVVWHRPLGQHDKQCYPYKVNYIVISRSPSGKYWASFSCVVDVPDPVIDPALDRVGVDSGLKDLVVGVNQKGFVKYQVTAPRYFRKAEARISRLQQVLAAKQKGSNNWRKVKKKLAIAYERVAFKRADLAHKISYQLTQENQLVGLETLNIQGILRNHCLAKSVSDAAIRALHVYITYKGKWYGAAVQFIERWFPSTKLCWDCGSLNDNLTLSDREWRCPSCGRQHVRDVTAAWNILQEAVRLLPGNPELSP

SEQ ID NO: 3802 - protein, 394 aa, unidentified
  REGION 1..394: note = Table 20
MFIRQNYRIYPNSDQKIQLNQWLGQGRYIWNRMLDNNIKEYEKNKKFIFKYDMNNLLPEIKNNPETSWLKEIPSQCLQQKCQDLDTALKQSFKTTKNKKGFPKFKSKKTDESGIRFPSFKFEGNRIMVPKMKKGIKIKLHRDLLGKKGAITISKDKVGNYFASILVELPENYFPPQINLIETGVGIDVGLKEFAITSDAEIIANPKFYGSAEKKISKLQKSHSKKQRGSKNKEKARIKLAKSYKKVTNQRKDFTNKTSNSIVKNNDIVVVETLNVQGMLKNHKLAKSIADVSWYQFHETLKWQCIKQGKIFTKINPWYPSSKKCSCCGEIKKDLELKDRIYQCSSCGFELDRDFNAAINIYQEGLSKYTAGTAEINACGDMSCGSNSAQEALDL

SEQ ID NO: 3803 - protein, 383 aa, unidentified
  REGION 1..383: note = Table 20
MSNKTFIRQNVRIYPNKEQIQFLNQNIGNQRFVWNHFLSENKKLYEEEKKFLFFKDTCSLLVDLKKENKFLQLGNSQALQQTLRDFDLALKAGYKQRKGFPKFKKKSSGGSFRLPQGCSIVDWKLKLPKIGFIKSKGSLPENFNSVTIIRKSSGKFYASFVVPFVLPEKVEIKSSIGIDLNSRHFVVLSDGSAIENPKFLKEKEIRLKRYQRSYSMKQKGSSNQNKARIKVAKQYEIVSNSQKNFLEQLTTNLVKTYDHISIEDLNVKAMQQFNGRMIGMAPFGSFRSKLTWKANKFGKHLSVINRFCPTSKVCSECGQELQLTLKDRWVDCDCGNSIHRDHNAAINIHRVGTTRINACGDRIQPTDFSSFRWLSLKQEAIPL

SEQ ID NO: 3804 - protein, 425 aa, unidentified
  REGION 1..425: note = Table 20
MIDTPTCCVNAQYMKKTLRYNFRLKPSPQQELKLVEFGSYARGLWNFLLSENQRQYEADKTFTFYNEMASKIKEIKKLPEFSWVKAFDSGAAQQVARDLDAALKNGTSKKSHHHFPKFKVSYRVNKQHNDSYRSVNNNNCIRVESGTITLPKVGAVPIVLHRKLVSSIKTATVQYRHGKWEVSLTQEVVCDEAKKVLKSIVGYDINSKQTVVGSNGLTVDNPKYLKQAKQKLTRLQRQLSRKKKGSVRWKKAKSRLNNLHGSIGRQRMDFAHKTAHRIANESDIVVFEDLNVAGMQKFNGKMVADNIMGLISDLTKYKVELRGGIHHETGRFERTTGVCSVCGQHHKLTLKERHFTCVSCGTFSDRDYSSAIAVQKIGESDLMANGTVVRVTKTPNTQQKSGVKTKVFALAKLSLGSEEIEKVAT

SEQ ID NO: 3805 - protein, 194 aa, unidentified
  REGION 1..194: note = Table 20
LDINKSIGIDLNSKTFVLSNTKEISIPKFLKESQNQIVRYSRKMSQASKNSSRFNLYKRKLSKIHLHVRNQREDFYHKLSLQIVKDYDFICLEDLSVKDFIGHLKKDSYFYEFRKMIEYKCELYGKKSLIIDRYFPSTKKCSDCGNIKPKILLSERIYKCDCCNLEINRDLNAAINIRTAGMAGIAQQQKLVMA

SEQ ID NO: 3806 - protein, 420 aa, unidentified
  REGION 1..420: note = Table 20
MFILRKNEKYIKLFINTCMRQLKYSYRIYPNKEQEAKLNQFCGAQRFIWNHFLCLEMEQYKLDGTFRFSHKNITSLPKMKNMENLLWLKDIPSTSLQQTLLYLDKALKHSFRKTSSKKGFPKFKKKKYYQGSFSLAMVNDKMIIGSHIKLPKIGKVKIKLHRKLPSDFKSCQVKQKANKWFIVFTVKVNKHKTVNKIQKVIGLDFNSKDIVVNSNDCSTTNPKFFVKSKQRIKKLNRQLSKKQKGSNNYKKQSLKLAQNHVHVANQRKDFLDKLSYDIVSNNDLICLEDLNIKPMQSFNGRMVQDAGWSMLRSMIEYKADLYGKHVSVINQYFPSTKLCSACGTIVNKSLRQRQHNCNCGLCISRDLNAAINIKNEGIKVFINNKVGTTLIYACGDTKGDDKTPSPVSMNQEAHVALANG

SEQ ID NO: 3807 - protein, 418 aa, unidentified
  REGION 1..418: note = Table 20
MNPLTRRYKFEIFPSPVQKRHLGKIFGSVRFVYNEFLKINEELYADGIQKLSRTEMQEHLLIWKEAIDWLSDVPSQSLQVATHDLDVAYQNLFAGRGKKPRLKKKLAAQSFSLPQPKIKSVSGQTCVFIPKYKTWIPMKMHREFPDGAKFGAATISKTASGRYFVSIVTKFNTKEKILSTHDGIVGVDLNIKHIVLSDGEKIQVPRTLETLESRKRRLQKKMQRQRDMQKSEKREDRSNNYEKTRFRLAKLHERIRFQREDYLHKLALNIYRKNQVVAMETLNVKGMMKNRRLAKSIAFQSWGRLVEIMKMYAVQYDKHLHFISTWFPSSKMCHQCGFVNSELTLSDREWTCESCQTHHDRDINAAINIQNEGGSYPVHQPVEREKALLYGRKGAQQPWPRRSRNHQDLRWHRETPSA

SEQ ID NO: 3808 - protein, 404 aa, unidentified
  REGION 1..404: note = Table 20
MLKAFEYRVFPTEIQREILLQNAGNARFIYNHLLAQIKETGEILSAYSLSKKLPELKSKFEFLKLSESSSLQHVTGHLGIALRRFFDKVSNFPVFKRKGVKDSFTISNINSNCWIWNPDSDNSTGKHQIRLAKLGWFKFSYHREIPKEYLIKRITIKLKSDNNWYISILSDNGLDLPEALNPKSSIGIDLGLKDFLTLSNGDKISSPKHYHLAQRKLKRLQRSFSRKAKGSLASLKQKSKISKLHFKIAAQRKDFLNKLSYSIVSKYDLVTLETLNVIEMSKNKYLAKAIMTSGWSIFKSMIEYKLENQGKWWCYADPFFASSRIHHNSGYKNSQLTLNVREWVCPESGSVVDRDVNAAINLDQLGQHWFLSNNLLNSKEYQEAIRSKTLLSLNLPKPESERAA

SEQ ID NO: 3809 - protein, 398 aa, unidentified
  REGION 1..398: note = Table 20
MNKTYRYKLFPRKDQLEKLSQAAGCCRFVYNEALAYRKEQYDLGTNISGFDLIKRLPQLKVVHPWLSEAPATSLQKSVADLDIAYRHFFRRVKQRQTPGFPKFKSKHDQKQSFNLKWDNISSSSATYFGCIWRNKQSNWIRLAKMGWFRLEMHRDLPENAIIKSATVKRDIDGWYISFLLELPELESQPCFEDAVKNSIGIDFGLKSFLTLSNGDEIKSPRHYHKAEKKLKRYQRSMSRKTKGSKNRLKAKQRVAKLHLKIRNQRKDYLRKLAFNLANSYSLITIEDLTIQNMSKNHCLAKSIMTSGWAMFAEFLAEKCLEADSHLIKADRWFASSKIIFDTGEYLPLLQLKHRWLIDCNGAKIHRDINAARNLNYWGQHLISTGEKLSTQAYLKLYH

SEQ ID NO: 3810 - protein, 427 aa, unidentified
  REGION 1..427: note = Table 20
MKYLKAYRFKLYPNKQQANAFARHAGACRWLWNHLLALQKQQYAETKTFIFFHDMSKMLPGLKEKYEWLSEAPSNSLVRVCRNLDLALKKCFKEGAGFPRFKVRGRCRESFYVINQALRIDQDRNKVFLPKTGEVKFRSGRLPEGVVAGANVAWTGRGWELTIQCKIEADVPVVIPEAQTVVGGDFGLKELLVRSDGVKVKPPKSLRKALKRLARAQKSLARRTKGGKNRTRQARLVGRLHAKVRDTRRDVQHKTTSALVRDASAVITENLNIKAMVKNRHLALSISDAGWGEMNRQITYKCEWAGKQHIKAGQFEPTTQTCSACYLRKTGDDKLRLHNRTFRCDCGLVIDRDLNAAMNLRRLGLQALGLQHANQDVGQAMPERALRRRRRKADACGEASGGRAASATLSHASRRQEPARSSTELSG

SEQ ID NO: 3811 - protein, 408 aa, unidentified
  REGION 1..408: note = Table 20
MKHRSFQYRLKPTSSQRKTLESFGSATRFVWNHFLSKNKETYEETQKFVFKHDMITSLPKLKQEFDWLKEIPSQSLQQKCWDLDTAIKNCYKRGFGFPKFKVKRHLSDSFRIPQTNGHIKSTRKAICIPKLGWISWIRHRPLQGKLKSITIRQIGQHWYVSILCEQKEDVLLTELNEYQILGLDFGLKSFITDSNGNKIESPKFYRSKQKVLRKKQRKLSKCSKGSNRRNKARIRVAKLHRDVANIRKDFLHKASRTIAKSALVIGIEDLNVKGMGRNRHLSKSIFDSGWGMFCSFLDYKIQEYGGCLIKIDRFYPSSKTCSSCGQVKDMPLDVRSYECDCGSVLDRDFNAALNIKREAINIFSRTGTVRINARGDTSSGVPAYDGIRNVSLNREKFRVDLDSEATFL

SEQ ID NO: 3812 - protein, 363 aa, unidentified
  REGION 1..363: note = Table 20
MLIRKAFKYKLEPTVEQEIMLNKTAGCCRFVYNYFLKLNIDQYAKDETFVFNHQMVNMLPELKKEYPFLTEVFSQSLQTAVRNLSTAFKNFFNKQNAFPTFKKKGKNDSFTCPQKFRIEEERNRIFIPKVREIKYRNSRPIEGEVKFITISKNCGKWYVSVLTEQEIEEQPKTFNNPVGIDVGLKEFAVLSTGETIPNPRFYRNLEEKLAKEQRKLSRKEKFSNNRQKQLAKVRKIHSKIANARKDFLHKLSTQIVNNHDVIGVEDLNIKGMVRNHRLAKSIADAGWSMFVNFLEYKCLWQSKTFQKVERFYPSSQLCSECGSKQIMPLHLRTYVCKDCGTNIDRDFNASKNIELRALQSALA

SEQ ID NO: 3813 - protein, 385 aa, unidentified
  REGION 1..385: note = Table 20
MRAQKGFKYRLKPTPEQKQLLLQQGGNARFFWNHLLADNIEYHKTTGKFKFAHEMVVSIPKIKEKHAFLKLSFSQSLQTVARDLDKAMKSSFKKTSRFPKFKRKGLQRDSFTVPQKWRLSKGYVFIPKVGEVKWIKHRPLQGESKKITISQDGDHWYCSVLCEVNSLDRPKDSSSVVGIDVGLRFFATLSDGTVIDNPRHLDKSEKRLADAQRSLSKKKKGSQNRVRQKKRVQKLYRRIRNQRLDFLHKASASVIAKHSVVLEDLNIQGMMKNRCLSKAISDAGWWSFRRQLEYKAQWEGKLFITIKRTEPTSKKCSSCGNIQEMPLGRIVYSCPACGMKMDRDLNAARNILNIGLNTAGRAEINACGVGTVVPTMKQEKECLVN

SEQ ID NO: 3814 - protein, 424 aa, unidentified
  REGION 1..424: note = Table 20
MPSVPCCAGAVNMLRGVQCRLYPTAEQREFFARSFGCVRFVYNEALAYCQAEREAQRKHPNAIDLQKRLVSLKGQYPWLADVDSQALKESCRDLDKAFAAFFRRVKAGQTPGYPRFKSRNDRANSYTATQRLHADFCDRRIKLPKCGWVKCRGLRKFDGKIKSITVRQSASGRYTASLLIEDGHAEPLPTALPAGVAVTGIDMGCKTEGDRQQLATLSTGQVIMMPAYLKGALKRLARAQRKLARKTKGSNNRRKQRQLVARLHERVANQRRDFLHQTTHRLTRENQALAVEDLNVKGMMASPRPKQDEQGGYLPNGRAAKRGLARSLTNVGLGEFARQLRYKALWRGVALLECGRFEPSSKTCSGCGHRLAELPLAVRAWVCPECGAEHDRDVNAAINIRNFAIMAVGAGSPELKLPERGTAA

SEQ ID NO: 3815 - protein, 375 aa, unidentified
  REGION 1..375: note = Table 20
MQSKLLAQMFGNQRWVYNYFLAEQKRRLDAKEKLLSRFDMQKLLPQLIQQNDWLLASKVDSLRFSIQALDNAFRRFFAKSARFPRFKSRSNELMVATDQPGKNLRFSKALGKIRAVAHRPITNGKIKRFTIKKTPSGKYFQSVLVETPESVPVVKQPNGFIGIDEGLTTFITLSTGRKIQHGKHYRANQARLKREQRRLARRKKGSNRRERQRIRVAKIHEKIQNSRSYEVHLITTNLVRKAVAESQGIAFQKTNIKNQMQNSKLALSITDASWGELRRQLSYKCERAGVALVEVDQWAPTSYPCFDCGAVPDTKGLAVRSWRCACGRKIDRDVNAARNISRLAERVWRREAPLLDEEAGAVRLADESSSGRKAA

SEQ ID NO: 3816 - protein, 384 aa, unidentified
  REGION 1..384: note = Table 20
MKGYLVKLYPNKSQAILLDKHFGACRWVYNKMIEISQKKYHRTGKSMSGYDMQAMLPKLKKQYPWLAEVNSQSLQIVCHNLADAYGRFFKKQAAYPCFKKKDSHDSFAAINRSYFCGNKLKLQKISAIRFRGGDRPEGAVKKFTVKKIAGSYYASVLIDTGIVPPALQPPERILGIDLGVKDVVVTSAGLHVPAPKYFIFSQKALKIRQRALARCRKGSKNRAKARLRVAKLHQKISNQRKDFNHKLTHQLVANSENQAFAVENLAVKNMLGNHKLAKHIADCGWNQFITFLNYKARDAGKHVIEVDRWFPSTKTCSACGIVRGKISLSERQWKCGSCGSEHDRDRNAATNIALEAGRDFAFDCGGNARPVAILANPVETRKCA

SEQ ID NO: 3817 - protein, 414 aa, unidentified
  REGION 1..414: note = Table 20
MSEIMRAYRYRIYPKKWQIEILEKSFWAKRFVWNHFLEINMDRFEKNEGILSYNKMSSMLTDLKKNNDWLYECEKSVMQNTLKDLAKAYDYFFDGPMTYSEKKLEKAKRTGKVLTFYDLQRHPKFKSRYDYEQSIVMNLTNNNIEVLEKEWEFTSINKYKKQNCKIKLPKIKMVKLAYSRPYEGQIQNVAITRESDGKYYISITCKDIPVKILPKTHKSVGIDLGVHKFATLSDKNVIDNPKYYQKNEKKLAKLQRSMNLKKKYGKNYHKSRLKVSRQNKKIKHRREDFLHKLTTDLVYDYDIICIEDLKPEEMKKDKLFAKSISDAAYSTFKRFLEYKMVPAHKKLIVIDQYYPSSQICHKCDYQNKRLKDVSIRKWTCQVCGTKHDRDDNASINIENEGLKGLKEGRYKSIA

SEQ ID NO: 3818 - protein, 395 aa, unidentified
  REGION 1..395: note = Table 20
MEIIRANKYRLYPSAHQKQILHEYFGASRFVFNNVLSKIQNNHFGTKLHKNKVISVIPSQTKLINELTNIKEEHIFLKKRANDLMQSSLSDLHSATKKFFKGGGYPKFKSRKNKHQSFEMKAGSRIQIQDLNIILPKPQKSDWSKEDLTIKFKNHKTNHKLPKKLIKYTISKDNLGQYWIAFTFKMEVPERKSKKIRTTGIDLGIKDLVITSDGVTFGNRKLTNKSQKKIKFLNKSLSRKKKFSKNWRKSSTKLAKTHKNIGNQRNYRNHEISRKLVDLYDFIGLESLQVKNMMKNKKLSKSIADASWFDLIVKLKYKMTEKQGQVVQIDKFYPSTKTCSNCGSIKEMTLEIRTYECNACNFHEDRDINAAINIKRESLRIFKENIWYNQFISKS

SEQ ID NO: 3819 - protein, 435 aa, unidentified
  REGION 1..435: note = Table 20
MNKTDNIYSTIRSAKFVLKPNSKQKEMIESFFGLSRAIYNISLYNIKDSKFGTYEIQNGKNKGNIVPRIPTEFDLNKSLPKLKDEYSYLALFPADYAQAIMRNLSRAFNNFYITLNYPKFKDKKSSTQSFNCYKGAKIEGDYIILRKPRASDYAEDDLRIRFKRHKIKYEFEKVTGFTISREDNKYYISFTFYTDIESKETSESVGIDLGIKDFVICSDGTVYENKRFFEKSLRKLKISQRKLSKKQKGSNNREKQRLKVSKLHKKVKNQRNDYQHKVSRELVNQYRTICLETLKVKNMVKNKKLAKAISDVSWSSFIEKLSYKVAENQGYLVKIDTYYPSSKTCSNCGCVKETLSLSERTFHCKECGFAIDRDLNASINILNLGLKNIVATVTTTGTTLKNQSLWSSKKTQIKSEKNYEARKTIKNVKNFYSSL

SEQ ID NO: 3820 - protein, 282 aa, unidentified
  REGION 1..282: note = Table 20
EGNTVFIPKLGAVNMAEPLRFKGKIVTGRVKEKAGKWYLIVVVEVEKPKAIIHPNLSTGIDFGLTRFATLSNGEVIETQDHFRKSERKLKLLQRGLARKVKQSKNYQKWKKKVARQHERIANQRRDFLHKETIGIIKQYKIICIEDLCLKGLMRTWLAKSFANAGIGIAVEQLEYKSEEFGNVIQRVDRFFPSSKRCHVCLHVNKELDLSDRIWTCPNCQTTHDRDYNAAKNLEMEGLSLLVGSGYVDQTPVEFLTTTQSFGIEQAGDDEAGTFVYICVQKR

SEQ ID NO: 3821 - protein, 426 aa, unidentified
  REGION 1..426: note = Table 20
MKEGCFIRAYKYWIVPETAQSEPFLKGVANAFGQTRFVYNKLKDYVDKKLDNREKLPSKTDLNNYVNRKLKKQHPFLRGSVDKFCFTHAAYQLHDAYSAFLEGKRGQPHFRKKFDSVQSFTTNFTNNNIKVDEENGIVELPYFNKRKGCPVKAVIHRSIQGRIIGAQVVRHATGDYYVVIICEVKIDELPENEKAVGLDLGIKDSVVCSDGTVINSIRALYQSEKSVKRTQKSLSRKYEAAKKRTPEGCRVQLSKNYLKDKAKLARKHKRVRNQRYDLAQKTSNKIVNENQIIIIEDLHVKGMLKNHHLAKAIADAGFYQLRRCIEYKAYALGRILVRVDRWLPSSQLCSHCWYQNKEVKNLSIRVWDCPNCHTVHHRDVNAAKVIKAAGLEMLSKGYYHSTSCRNAAKLSVWRGRYSQTNLTSPQ

SEQ ID NO: 3822 - protein, 341 aa, unidentified
  REGION 1..341: note = Table 20
MELLSAYSFINNVLKTKYPWLKGTVDKYYFSHIADYIHDAYIAFLCGRSGRPRFKSKTRPIRSVTTNNSSGSSFKLDEENGTLALPYLRGEHKLKIFYHRKIQGRIVGAKIIRHACGDYYVSLYCECDRSPLPKTGRAVGLDAGFKTLISCSNGKEYPPLKALRKYERKLSRLQRSMTRKYKMAKIKAPDQEYKKSKNFLKIKAQYARLHERVRCMRSDYAHKISTELIRSYDTIVSEDLCLAGMKKSRRFSKSVSDAGICHLYRMLAYKGDWYGRTYIKVGRFFPSSQTCPQCGYQNHDLKDLKIRIWTCPQCAAVNARDISAAKSILKEGLRMLEEAAP

SEQ ID NO: 3823 - protein, 381 aa, unidentified
  REGION 1..381: note = Table 20
MSIKAIKYELKMNATQTHKLRCAVGCVRFVHNYMLDIQQKHYEENKKWIPYPTLSKKYLTPLKQQHDWLREPSKWCLQVACKNLCENLFSFKKLGRSFPKFKRKGRCVESIHITENPQLNYEDWTCKIAKIGKVKVYRGHNKRIPKDAKVYHYSVEYKPSLDRCFLSVVYEDNSLTNKRIPNKDTHCGIDVGIKTFATLSDGKVFENQKHLKSNLKKLRVLQRSASRKYKKGVKTEEQSSNWKKVQRKIAKLHFHIANQRQDYNHKVSKYLSENYYLVSVEDLAVKNMVKNHRLAQAVSDVAWSSFLSMLKYKCQAYQEVDRFFASSQTCGYCGYKNLKVKDLSVRSWVCPQCGVKHDRDLNASKNIDREGLSLWRRKVSQ

SEQ ID NO: 3824 - protein, 384 aa, unidentified
  REGION 1..384: note = Table 20
MLRAIKYELNPTKAQKTLIKQSCGCCRKVYNVMLDRKIGAYKKDGTTLSAFELINQLPKLKSELEYLKECPSQALQQVIKNLDKAYQNFFRKGGNGYPKFKKKGIKDSFRIPVACAIDYDNWTVKTAKIGTIKIYKGHNKQIKGTIKSYTITHTNTGKYFISVLYETMDKPKLNNNKSVGIDIGIKDFATLSDGTVFENQKHLKSNLKKLRVLQRTASRRYQKNKKREEQSNNWKKSVRQVAKLHERITFQRNDYLHKISTWIANNYSIICIETLNVKGMMKNYHLAQAISDCGWSKFVNMLEYKCDNLVKIDKWFASSQTCFECGYKNTNIKDLSIREWTCPVCGTYHNRDLNAAKNIEREGLSLCGHKVSGCTMLAPRTPPL

SEQ ID NO: 3825 - protein, 323 aa, unidentified
  REGION 1..323: note = Table 20
AIEHVDNAFQRFYKHEGGFPKYKSASKPSGNKYTTKYTNGNIKLLTNETGLPCIQLPKIGTVHFILPRGNTLETLLPPNTRILSACVKRDAIAYYISLQLETIVDLVKPLEEISYKDICSIDLGIKVFGVLGNNEEEEVVENPRWIKLHARRLRRFQKALSRKQYNKETHTGSKNWEKARRKVAKEQRKCANQRKDFQHKLSHKIAQKYKVFVCEDLNVKGMMKNHHLSKAIASVGWSSFLTKVQYKLEAKGGMLIKVGRFFPSSQTCSHCGYKNKDVKDLNIRAWVFPKCGTYHDRDANAKRNIYNEGVKLLREEFNIKIAA

SEQ ID NO: 3826 - protein, 404 aa, unidentified
  REGION 1..404: note = Table 20
MISKSYKVRLYPNKQQEVLLRKTFGCVRKVWNVLLDENIRGYEAAKETNGKHSVVYNTTSLKKDYDFLKEVSAAALQQKGRDLKETYSQFFKGVSGKRKASIGYPKFKSKHNKQSFRLPVGKFTLLQEEKKIRLEKIGRVRCRYPATIPTECKLVSVTVSLTTSGEFYASVVTQQEPTLLPLTGKKVGIDLGIKELMTLSSGHSVMNPRFLRESQSKIARIQRHLSRKTKGSNRYARCKQKLAKVHRDVARQREWYLHNVTKALVKEFDLISIETLSSEGMKSKHKKVNSSLYDTSLYELTRQLEYKCHHYGKTLVKIDKWWPSSQLCCECGRQNKEIKSLSIRSWQCSCGATHHRDYNASVNILKKGLEDLSVESTDYIRGEFLCSFDYVKEVDEFIEAYNLL

SEQ ID NO: 3827 - protein, 384 aa, unidentified
  REGION 1..384: note = Table 20
MAFIVAFKFRLKPNKEQEKLIWQNINGARLVYNLLLEDNNRIYKEYKKSSTLTVKQIKDDPKYAFLKGCDANALAYSKRHLDQAFKNFFRGLKKHRKIGYPKFKSLAHSALTYTTYRASSYKNSPIEEGNLALNEKKGLVKLPKIGWVKVINHRPIPKSGKIKSGIISADRIDRYYISISVELPDGYFLNLKERSANRVGVDVGIKYFATLSNGIKIKNKHFLKNQEQKLIKLQRKRDRMQRGSNNYRKANMKLRKLHARIARQRRAFVQQTSTDLIKNNYVIAIENLNVKGMVSNHKLAKSIEEEGFNEFKRELVYKSEFYGRKVIEIDRFYPSSQICCVCGYQNKETKNLAVREWQCPKCGTIHDRDINAAKNILKKGLEKI

SEQ ID NO: 3828 - protein, 411 aa, unidentified
  REGION 1..411: note = Table 20
MELVNSGLIRPCKYVYGLDDTSIEQRTQNTYKETFYMINYAHKYRIYPNKEQQELIWKNINGARFVYNALLADAKQQYEETGKSKLKLVTWVKNKPENYFLKDCDNNCLDYARTNLSQAYQNFFRGVKKHQKIGFPKFKNYHKCAWSYKTRVHKKEKSIRLEDDHIKLPKISPIKIVLHRPLPDDCRIISATVSMTKSGEYYVSIGFEVPDDHFKNVDYHTDKSIGLDLGIKDFVITSDGKKFPNMHAIKKSEKKLIKADRALARKQNGSMGRVKAKIKRAKVYERLQNQRKAYLHNISKYLIVNYDKIAIEDLNVKGMMANHKLAKAVGDVSLYEFTRQLQYKADWYDKEVKKIDRFYPSSQTCNDCGYRLEGADKLTLGDREWTCPNCGVIHDRDINAAKNIRDEAFKK

SEQ ID NO: 3829 - protein, 225 aa, unidentified
  REGION 1..225: note = Table 20
MDLSNIKIVNVTVSKTPANEYYASIIYEKEIMMFEKTNKSVGIDLGVRTLITTSDNEKYNNPIKLNKIEKKIKRYQRQVSRRMLDSNNRKKARVKKAKLEKHKVNIINDAIHKATTNIIRNYDFIYMENLNLNDLINKQEKRYNKRKLIATSLGKVRIYLEYKSKMYEKQIHYIDRFYPSSKTCSKCNCRYEIKDSKVYECPYCGLKIDRDYNAAINILNYGLTH

SEQ ID NO: 3830 - protein, 360 aa, unidentified
  REGION 1..360: note = Table 20
MKKGLRIRLYPNNKQINTLNIIFGHTRFVYNYFLDYSKNSKDYKYTNWSKMLTTLKNSDDTIFLKEADKFALQNSLKNLNRAYENFFSKRANEPVFKKKHNAQSYRTNYTNNNIVLYEKGIKLPKLGIIKCKYGKDIKDNKIINVTVKLLKSGIYEASIIYECEEKTLLKTGNSVGIDLGIRKLITTSDNDKYISDLDIDRLNKKIRKEQKRLSKRTLHSNNWNKQRRKLAKVYQYKDHYMLDTIHKATKAIVEKYDTIYMEDLDIKDLLSKQKLKIHKREMLLSSLGQITTLLKYKCERYGKELKKIERYYPSSQTCSHCGKTYRVGKSETYRCPHCKLIIDRDYNAALNILNYGLSHN

SEQ ID NO: 3831 - protein, 589 aa, unidentified
  REGION 1..589: note = Table 20
METEKGFLYTYKFQLRPTAIQKNFLNMHFGCCRKLYNEILGETLPIYRAEKDRWKNWKKADDEIKEESKNDKALEEKLRIERKIPKKYDEYLTVNNIERPPYLGNKFSYNGQKKGGYTSVSEYREKYEYLKEIDATALNYVVDNVASAYKACMNSNTNAKEPRFKKRWDKQSYSTTRMINKGNDKYDLMVGNIKLDKENASILLPKFNKEWNGEKVGWIKINLYRDIFFDNNRFYISSVTLSKTPTDEYYISMLCYYEKNPIKQIEKANKVCGVSFGIVNNVVTTSDEKRYYKPDTKKLARIDNHIRKLQEELKNKQKPHFDKETDQYVKGSKNYDKLQKRIKKLQEKRKNILDYNTHCISKSLINEYDKLYVRDFDTKEFMRQRKAEDGKVANETNSDYIRMTADANIGKITEQLKYKSEMYDREIHLINKFYPCSKICCKCGSPIKNYDSKDKYVACSNPNCNAIIERQLNSAKNILKEGESILDNYKSYEDYEKERKKAKKDAVESIVKLQYKIIQLKINYNQNATNPIIINDNKIYSLASKIIHEGKNFTDDEIIEQLQQLVSTNRRNRPHSKTGLKKKKEKDIM

SEQ ID NO: 3832 - protein, 453 aa, unidentified
  REGION 1..453: note = Table 20
MLKAVKYRLYPNKEQEALFLRYFAACRYVYNIALEVKIYAYRAHGVTVSEYDLVKQLQEAKKENEWLKEFAAQTLNYEMTCLDLAYKAFFKTKKGFPKFKSRYDKQSCTFLQNSFVPDDQHIDLPKVGLVKGSIHRRLEGVVKRITVSRSASGKFYASAIVEMEESKHQLPGTGKAVGVDMGVRNLVTIHDSVSQDKVDLAGIIKSGKSEGMKRRLEHIQALIRRVQRHLSRKTEHRKRDKKERSKRQEKCRIRLARLKEKESFIRANLLHEISCGLTNQYDTICIEDLAVKNMSRTAKGTVEEPGKNVKAKQGLNRVIVNSGLAMLRTQIEYKAAQKGRKVVVVSRWEPSSKNCSHCGVKNTTLGSKTKWTCNNCGESHDRDGNAAKNILAAGMAASDVLTEYTRGAERKTRNKKSGGRVSKEASTPENYPTNKERKSRTKRIVAPQGVTDG

SEQ ID NO: 3833 - protein, 426 aa, unidentified
  REGION 1..426: note = Table 20
MNHKSYKFRIYPTKDQENYLAQCFGAKRFVYNYFLYLNNQRYQNKEEFLNAFGCNYIITDMKKTDEYSWMKDVDDWVLKNATNDLGQAFKQFFNSLKGKRKKSVDKPTFKKKDTRQSFRTYCKLSDKGLKIPKLKSLIKIVQHQEVVGNIKSVTISKCPSGKYFASILTEQDIIPKEHTGKEVGIDLGIKDLIITSDGVKFVHPDKITEKVNRLLKQQQKILSRKDKGSNNYERQRVKVAKLYEAITNIKKNYYHEISNYLVSSYDAIYMEDLNVSGMIRNRKLSRAIHSASWSMLSSMIEYKANWNQRSFHKINRWFPSSKTCSCCGHKMDSMGLSIREWTCPSCNTIHDRDLNAAVNIKQQGQLDLYNHIPKQQGNWDRNVSIPSVLQKLTTRIPMESGKIERSIDLSIVGRGSEQAVDLYGLS

SEQ ID NO: 3834 - protein, 362 aa, unidentified
  REGION 1..362: note = Table 20
MEKRFLLRIYPTKEQEKLIQRTFGCARFVYNYFLDYRIKKYNEENISLTANDCSKVLTELKKEKEFLQIPDKYALQNVLKDLDMAYKRFQKGLANYPKFKSRSNYKTYRTNRSGNKIRFISDNIIILPKLREVKFRNNIIPDGEIVNVAIIQKPSGKYYASVLCRNCKIKNVQKTGKSVGIDLGIKDYIVTSGGQKIPNNHFLKKTISKIKRMQKEFDRKKDGSNNKEKLRIKIAKQYEKLTNARKDYIHKLSMQLIKEYDDICIEDLKIKDMVKNKQLSFDIMDCSWYELRRQLEYKAKFYDKKIHIVDRYFPSSKKCSVCDYKKEDFTLNDRFWTCPKCGTVHDRDINAAKNILKEGMKN

SEQ ID NO: 3835 - protein, 571 aa, unidentified
  REGION 1..571: note = Table 20
MSEYKAYKFLIKPTKEQISFFKDHFEVNRYLYNTMLRTSLEKYNSESDQFFLESLNKPEIIEQIEHLKQSNAPQKDWYKFINMAKKGGKPASVFDLQKLVTALVADPDVPWVSTYYDADAMRQVSVDVQKSFESIFKGNQPRFKKRNQIKSVTFRGKTTKTKNGTRDSIEAYQDQNQIKLPTVKLINAVIHRPVLGPIKLATVSQAPTGKWYISLISKYDGEVQLPKHDKLVAFDQGLTTFLTGALDTESNTIIKYESPRFFSPENKKGNQQSLIEKLTRAQKRLSRKYEIAKKQRLDGLQEKKLAIENNDTLAEIAAIKKIEDSYLCNRSNYQKDRIQVAKLQTKIANQRAAFLHNLSKQLVSEYDTIIIEGFSIQDLVQNIKSDTTISTKQKTNTIKKIHDLAWYDFRVKLDYKCQMYGKKLIILPSDFDANKKCHHCQTTFDVAIPYTQYEFTCPNCQLTFNRAENSAKNILKEGLAIKRHLDLVQTATQDIKTINPKLNVAYNTKTQTWLIKEVTSEKNEIQKEFAQKLIEIKKGKLKEFKITANNCQTTNADLLKIKELLKEFITS

SEQ ID NO: 3836 - protein, 437 aa, unidentified
  REGION 1..437: note = Table 20
MSIYKNFEYRVYPTDEQKKWFEEHFEVNRFLYNHLLSMSIKKYNTEVDERFLRLIKDIDFYSEKIQQWTQIDYEKLYKKAKKGVKIYSKNEFSKLITKAVNNPDFPWVNKSYDGRAMREVATSVDTAYKNFFKGKDFPRFKKKYSVRTLRFPVSKQGEWYSIRFESDKILVLPKKIKLRIVQHRPFEGEVIAATIKKAQSGKWFVTILSRVDPPTQLIKTGDIIALNRGVREYMIGYDSNHKLINYAPFVKDPTLISKINKLHKKLSQKYKSAKQESRSLRDSKNYQKNKESLARLYEKLKFQKEYYLQQLSRKIIEDYDLIILESLSIKELASSNIGEKVKSGERIVQRRFSKKIMGMSHYRLETLLKEKAELYGKRVVMLPKGFNSNGVCSECGTIFEESIPLNNKEFICPNCNIKITRGENSVKNILREGMKYL

SEQ ID NO: 3837 - protein, 394 aa, unidentified
  REGION 1..394: note = Table 20
MTNKQIDYQNYTLQVRLYPTKEQIVYLNKAFGSTRFVYNYFLNKSQEEYKNKKKCFNCIEQERELTKLIKTDEYIWLKEVDSQCLKSSLKHLDKAYKNFYKAIKEKKQYTLRFKSKHTHKDSFTSQCINNNCKIDFETRKIKIPKLKTWIKFRDDRIIDYKSLQSITIKRTPSGNYYASILFRIPKQIANYQVDINNSVGLDFGLKNFITTSKGEKIYSPQPLKKNIKKLAKLSKQHSKKKANSKNKEKARIRLAKCQEKIANIRKYWNHCLSKQLSNNYDFVFIEDLNISAMQKLWGRKISDIAWYQFTTFLNYKMINKGKYCLKIDRYFPSSKTCNHCGYKKEDLSLSDRSWVCPNCGDVHDRDLNAAKNILKEGLKHFSTDVQSGFQACGD

SEQ ID NO: 3838 - protein, 381 aa, unidentified
  REGION 1..381: note = Table 20
MLRAIKVRLYLNKEQEQAINKLLGCYRFVYNYMLALKRKEYIDNKINLSLNDLSKYFFETLRKDETYIWLKEQNTSVMQQAIRQMCTAYNNFFKNHKGFPKFKSKKDNQSALFSIIAISKKNTFKERKITLTKSFKDIKFRCSNLYFKRLQTYNDKIRSVTISKTKSGKYYLSILMDIPQDEYVKFKKTGKSIGIDLGVKDFVITSDGDKFENKHFLKKQENKIKKLQKQLSRKVKGSNNRNNARIKLAKAFEHLANRRENYIHEVVNTLLTKYDTIYIEDLNVSGMLKNHKLAKAIQEVGFYHFKVILQSKSLVNNKKVVFIDRYYPSSKACSCCGFNNKDLKLSDRYWICPECNTKHDRDLNAAKNILREGQQILNQRT

SEQ ID NO: 3839 - protein, 375 aa, unidentified
  REGION 1..375: note = Table 20
MSEDIYKAYRFRLYPNREVQSIFNQWFGCCRKVFNVTLDESIKQYEAGNKEFVNRSSFCSMITKLKADGEHDYLKQVPIHTLQNSLANLLDSYKRFFKGLGGYPKFKSKHESKQSFTVPCSPSIIKNCHFDNNRVWIPNLKKLIKFEQHRKIEGVVKSYTITREATGKWYISFLCQTVAPQKIEKDSVIGLDFGVIDFFTDSNGNKVLARKFLQSMESKLKKMQRALSKKVVGSNNYKKLKQKIARLYDYISNCRKDANQKLSTILVNENQVISIEDLAISKMSRNHKLAKSLLDEGWYQFTSMLDYKMKWCGGSLVKIDRFFPSSKTCSACGYKVSNMPLNVREWVCPNCGCVHDRDINAAQNILTEGLRLLGL

SEQ ID NO: 3840 - protein, 690 aa, unidentified; identical to SEQ ID NO: 628
  source 1..690: note = NW_005434667.1

SEQ ID NO: 3841 - protein, 7156 aa, unidentified
GAATCCAGCATGTTAGTGACATTGCAAAAGAAGAAGACAATCAAGATTGAACACACAAACTATGTTGCAACAATGTTATGAATGTGTAGCATCCTATAGTAAATGTCTAAACATATCTTATATATACATCTTTTACAAAGATTGATTATAAATAATCATAGATCACAAAAAAATGCAGTAAAACATAACTAAGTAACTACTCAACAATGTTTTTATTGCTTGTTAGATATCTCCAAACACATAGAAGTTAGATAGGTCCATGGCCTAAAAATGATATTGATCTATATAAGGAAATTGATATACTATATACAATGGATCCATTTGTCCAAAAGTTCAATTCTATAGAATTTGATAAGACCATCTTAGCACCTGTCAAAGACATAATATTTGAGAGATATCTCGACATATGTCATGATGATATAAAAGAGTTCAATGACAATAACTTCTTATGCCAGATGTGTTGTGAATGGCTGCCAAAGTCAGAGAATGGAAGGATGGATATATGTCTTGTTTGCACTGAAAACTATGTGGTATGGAGGTGCAAAAACTGTGATCATGTATTTGAAGACTGTGTGATCATAGCAAAATCAAGGCATGAGGCATATTGTGGTTATTGTTATGAATATGAGATAGATCACACATGCCCCTGCGGAAAACTTTACAAGTTAAACAAGGGTCTGAATGACAGATTCTGTTCATCAATGTGCAGCATATAACATAAATATAACAAAGTTCTTCTGTTTATATCCATTTTTATAATATGTGTGATGAATCCAAAGATTAATATTGTAAGATGGCATTGAAAGATGCTCTTATCACGTCGAATAAGGAGGATTTTAGTGAGGGGATCTTTGGACAATTCTTGACATGGTTGCTTGAGATATTGAATCATATGGTAACATCTAATATAATTGATGATGAAACTAGGATATATTTTGATATTCACACATTGGAGTATGATAATATCATTCCTTTAATTATAGTTCCTCACAAGCATTATTTATTGCCAGCAACCGATATACATAGAATAGATGTGTCAAGCTACAAGATAGCCAATGATTGTGAATTCCCTTTCTGTGAGGAAAGCTTCTATACAGCAAATCATATTTTTAATAAGTTCTTTGATTTCTCAGATTCTATTAAAACAAATATACCATCTATAGATCGCTCAACATCGGTTGGAATCCATTTTCGTGGATCGGATAAAAATTTTGATATAGGTCAGGCAAATCCTATATCAGATGAAGAATTCATTCTAATTGTTCAAGATTTTCTTAACAAGAATAGTAAAATTAGATGCATATACTGTTGTAGTGATGAGCAACTGTTCATAAACAAGATGTTAGATCGATTTGGAGCATCCTATGATGTTTTGCAGTATCAGCAGAAACAAGCAAACAATACCAACAGAATGGGGTTCTTTAGATGTGCTAAATCACTCCCTAAAGAACAAAGGGATTCATACATATCTCAAACCACTCTTCCTCAGTAAATGAGTATGCACATTTATCTATGATAATATTGAGCAAGCCCTCATTCATCGTGTCAAGCAAATTGAATTGTGTGCGCTCCAGCTTATCTGATATATGTGTCACATTCTCTTGAATGAACTTCAAATATCTCTTAAGATCTAATCTATTGAGAAAATTGTTTATGTCCAAAGGGCTTGTGATGTGGCATTTAGATATATCAAGCAAATCCACAGCATCAGGATTTTTGTTAAACCATATAGAATCGTGCACAATCTTTTCTGGATAGGCCTTCAGAATATCTAACGCATTCTCATTCTTTGATAACTCACTCCAATAAACATTGGACAGGTTGTCTCTCAAGATATCGATAGCACCCTTGTTTGCTGAAAGCACCTTCCAATCAATCTCACCCAAATTATCCTTCAACAATTCAATTGCATCTTCATCATCCTTTGCTGAAAGCACAGACCAATCTATAATATCAAACCTGTGCTTGATGATCTTAGCATATATCTTAGTGCTCTTAGAGTTGTTTGCGTTTTTATGTTGGGAAGCGAAGCTTGCCACAGGCAACACTTATTTTTGTACTTGAATATGTAAGGATGTATTCTAGAACTTATCCGGCTGGAGAGGTTATCAAGGCTCTTGAAGTTTATAACAATGTAAAGAGTCTTTCTCTCAAACTTTCATTGAAGTTTGAGAGTGGAAGGCTTCATACATCACCGGCATTAGCAAATCCACCATTCAGAGATGGTGGTCAAACCTTAGAATGACTATCAGACGCAAAGACAAACGCAAACGACGTTTCAAGCGCCGTCATAAATATCCTCATCTAAATGATGTCATAAAGCACCTCTTCTATCAAAACAAAGACATCGCCTTCATGCATCTAAAGCAAATCCAATATACGTTGAACCTATCTTATGACATCTCTCCATCATTGACATCTCTTTATCGAGTCCTAAAACAATCTAAGATATCAAGGCGTCGCGACTTTGTCGCTTTTTGCCGACCGCCAAAGGCGGAGGCAAATCGCTTCAGCATCCACCATATCAATCCAACAAATCCAAGTGATAGAAAGGCCAGGTTTTCAGACTTCAAGGCCTCGATAGATCCATTATTGAACGACAATATCGTTTGTCTGGATGAGACCTCATTCTGCAATGTTGGCAACCCTTTTTATGGCTACTTCCCCAAGGGAAGACAACCCAACGCAATCAAGGTATCAAAACGTGAAAGAGTATCATTGGTCATGGCTGTTCACTCTTCTATTGGCATTGTTTCTTACAACCGTGTAAACAAGGCCTTTACAAAGGCTTCATTCTTAGTTTTTTTATAGGGTCTTATTCCTAAGCTTCCTAAGAGCACAAAAGCCATCCTTATGGATAATGTGGCCTTCCATAGGTCTAAGGAGGTTGTTGGCTTGTTGGAACGGCATAAGCTTGTTCCTCTTTATATCCCTCCGTACTCGCCAAGATGCAACCCCATTGAGGAGGTCTTCTCTCTGTTGAAGAGAGCCTTCCGAACCAAGACAACAAAGAAGTGTCTGGCAGACCGTATTGAAGAGGCAATCGACATCATAAAAGGATATAAGGATTTGGATCTTAATTATAAGCATACAAGAGACTATGTTAGAGCGGAATGTCAAACATTAGGATTGTAAAACGAAAGGCGAAGGGCTTCTTCAAGTGTGAGGACCTAGTCACAATCAAGGATGCTGTCAAGGCAGCTCATAGGATCATGTCAGATGCGTCCATACTCGTCCGGTCATATTATCTGCGATGGTTCCAGAGCTCATATCCCCTTGATTCAGATGACAAGGAACTTGAGCTTGAGCACTTCCATATATCCATGGCCTGCAGCATAGTCCAGGGTATAACAAGGCCTCCAGTCCGTGGTGTTGGTCCTGAACAATCTGTCAAGATAGACGTCTTCAATGACATGTTAGATGAGTATAAGAGGCTGTACGAGCGTGCTCCAAATGATAAAGAGAACGAAACGGACCTCTCTCTATCGCATGTCTTAGCATATTCCATCGACAACCTTCTTACCGCGTATAAAAACAACATCGAAGCCCATTTCTCAAAATATGTCAAACGCTTCATCCGATGTGATATGTTGGCTAAGGGCTTCAATAAGTCTGAGGCAAACAGAGTGGCGGCAATATATACCAATGCCTATATTTATGACTCATCCCTCGACCTGGAACCAGACTTTATGGAAAGATTAGGCCTTGAGGCAACAAGTTATTCATCTCTATTCCCCTCTAAGATAAATAAGGGCGGTTTTCCAAGGGTCTATGACCTGAAGGCCAACCCTTGGGTCTATCTTCCAAAGATGGTCATGATAAATCAGGCCTTAGAGACAGACTTCTCTTCTGTAGAGCATAAGGAGAGGAGGCTGCTCAATCCACTGCCCTTCTATTCATCGTTTGTTCCGATGCACATACGGATTGATACATCCGGCTTATCGCAGCTGCTGATGACTAAGGATAGGCTTGATGATTTCAAGAGATCTTATCTTGCTGAGTTTGGAGTAAGTCTAAATATAAAGAACAAGGGTGATATGCTAGCAAGTTTTGAGAAGATCTTTGGCCGGAAGGCAACATCCAATAGAGAGGCCGGATTGTATGCAACAGAGATGTGGAGCTTCTTGACAAACCTGAAGACATGCCGTCAATGGAAGGAGCTTGATGGGGTTGTTCGTAAGAACGATCCCAAGGGAACACAATGGATGTTTGACAATGCTGTTGTAACGGACGGTGTTTCAATCTCATTCCAGGTGATCGATAACAGCATGTTTGGACGGAAGGCCTTCTCTGGCAGGAAGAAGAGGGTAGCATGTCAGGAGGCCAATGATGAAGAAGATAGCAAGCAGGTAACAAGAGAAGAGCTAAAGACATCGAAGCTCTTGGGATGTGACCCTGGGAAGAGAGACATCCTAGCAATAACAGATGGCATAAAGACTATCTGTTACACCAAGGGGCAGAGAGACATGGACACGCATAAGACAATAAGGTTGAGAACCAGTCTGAAGAGGCGCCGAGGCTGCGGCCTAGAGGAGTATGAGACACAGGTGATGAACCGGTTCCAGAAACGGTCATGCCATCCTGAGATGTTTCGACGCTATGCCTGTTCCAGGAAGAGGATGGAACACATGCTGCTTGAATGTTATTCTCATCCAGTCTTTAGAGAGTTCAAATTCTTGGTTTACAACAAGACTAAGAGCTCCGAACATAGGTTCATGCATAGGGTGTTGGAAACATTCAAACGGCCGCAAACAAACCTGAGCAAGGCGAGGTGTGCGTCAGGAGTTATGCGTATGAATGCCTTGAAGGAGGTCCAAAGGCATGGAGATATCATTATAGGGTGGGGCAACTGGGGAAAGAATCCAAACGCGCTACGATGCTCGGCAGGACCAACCCCAGGCATTGGAATAAGGAGAAGGTTTGAATCGCTGTTCAAAACAACAACAGTGCCAGAACACTACACCTCCCAAGAATGTCCGAGTTGTAAGGGACGATGCCTAAGAAAGGCAACTGGCAACCCGATCATGAGACACCATCTGCTTCGTTGTACAAACGATAGTTGCTGTAGCAGGTGGTGGAATCGGAATGTAGCCGGGGCGTTCAACATCCTAACAAGGCTGTTGGATGGACAAACACTATCCGGTAACGAAACTACCGGAGACGGGTTAGGAGGTGACGACCTCTAAAACCTAGAACTTAGAGTGCAAAAACGCCATTACGATTGTGATGCCTATTCAAGGGTGTCCCAAGTGTAAAAAGAAAGCACTCTAAGAGCATTAAACTCTACTCTGTCAATGTTCTCAATAAGGATGTCTGAAGCGTTCTCATTGCATGATAGATTGTTCCAAGCCTTGTCGGTCATCTCATCGATTTTTATATTTATGATTTTCATAGCAGTCGGATTATTATTCAAACAAAGACCTTCTATGTCAAGTTTGCTCTCATCAACCCATGGTAATAGTCTATAAGACATATCTTATCCTCCTTAAGTATTTCCTGTTGTATATAAAGAAAAATCTTTGATATTATTTTTACCTATATTTTATCTTGATGCTCATGTAAAAAAATTCTTGGATAGAAATACTATAATTTTAGATAGCATACAATCACTAGAGGTGGAAAATGATTGCATGTTACTTCATACTTTCAAGCAGTGCGCATCACAGGAAATTCAAAGCTTTATGGTCGATTCCTCTAATAATATTCAGTATAATACTCTCCTTAAGCTAAGCAATGAAGAAGCATCATCTCAACAGCTTTTGGAAGCATCTCAACAATCTTCAGAAGTATCTCAACAAGAGCAGGCTCCATCCTCAACAAAGAAGACAGCTAAGAAGATCCAGCAACAACACCAGGCTCCATCCCCAACAAAGAAGACAGCTAAGAAGATCCAGCAACAACACCAGGCTCCATCCTCAACAAAGAAGACAGCTAAGAAGATCCAGCAACAACACCAGGCTCCATCCTCAACAAAGAAGACAGCTAAGAAGATCCAGCAACAACACCAGGCTCCATCCCCAACCAAGAAGACATCTAAGAAGATCCAGCAACAACACCAGGCTCCATCCCCAACCACGAAGACAGCTAAGAAGATCCAGCAACAACAGCAGGCTCCATCCCCAACCAAGAAGACATCTAAGAAGATCCAGCAACAACACCAGGCTCCATCCCCAACCACGAAGATAGCTAAGAAGATCCAGCAACAACAGCAGGCTCCATCCCCAACCACGAAGACAGCTAAGAAGATCCAGCAACAACAGCAGGCTCCATCCCCAACCAAGAAGACATCTAAGAAGATCCAGCAAGAACAACAAGAGCAGGCTCCATCCTCAACCACTATGATAGCTAGGACGATGCAGCAATCAGAGATTTTACCTGAAATGCTACAAAATTCTTCAAAACTACCTACAAAAGATACAAGAAAGAGAAAAGCTCGAACATATATTCTACAACACAAATATGATAAGCATCCGCAACAAAAAGTTGATAAGGCTAGGATAACTCTTCCTAAGACAAAACAAAAAAAGGTTGATGATGAAAAGCAAAAGGAACAGGGTGAAGAAGAAAAGGAGGAAGAAGGAGAGCAGGATGAAGAGGAAGCAGAAGATGATGAGGAAGCAGAAGAGGATCAGGAAGATAGTCAAGAGGAGGAGGAACAAGGAGACCAGGATGAGGAAGAAGAAGCAGAAGAGGATCAGGAAGATAGTCAAGAGGAGGAGGAACAAGGAGACCAGGATGAGGAAGATAGTCAAGAGGAGGAAGAAGAAGGACAGCAGGATGATGATGAAGAAGAGGAGCAAGATGATGAGGAAGCAGAAGAGGATCAGGAAGATAGTCAAGAGGAGGAAGAAGAAGGACAGCAGGATGATGAAGAAGAAGAGGATCAGGAAGATAGTCAAGAGGAGGAAGCAGAGGAGGATCAGGAAGATAGTCAAGAAGAGGAGGAACAAGGAGACCAGGATCAGGAAGATAGTCAAGAGGAGGAAGAAGAAGGACAGCAGGATGATGATGAAGAAGAGGAGCAAGATGATGAGGAAGCAGAAGAGGATCAGGAAGATAGTCAAGAGGAGGAGGAACAAGGAGAGCAGGATGAGGAAGAAGAGGAGGATCAGGATGATGAGGAAGCAGAAGAGGATCAGGAAGATAGTCGAGAGGA

SEQ ID NO: 3842 - protein, 784 aa, unidentified
MSNIRIVKRKAKGFFKSEDLVTIKDAVKHAHRIMSDASILIRSYYLRWFQSSYPLESDGKELELEHFHISMACSIVQGITRPPVRGVGPERSAKITIFNDMLDEHKKLYERLPNDKGFETDLSLSHILAYSIDNLLTAYKNNIETHFLKYTKRYILCDMLAKNMDKSEARRVAAIYTNVYMYDATLDLQPDLMLKYGLHDASYSFLFPPKIKEDAPRVYDLKANPWVYLPKMVMINQALETDFLTVMHKERRLLNPLPFYSSFVPMHIRIDTSGLSQLLMTKDRIDDFKRFYLAEFGVSLNISTKANMLASFEKIFGRKATSNREAGLYATEMWSFLTNLKTCRQWKELDGVVRKNDPKRTQWMFDNAVVTDGVSISFQVIDNNMFGRKVFSSKKKATTCEKDDEQDSKEVTKEDLKTSKLLGCDPGKRDILAITDGVKTICYTKGQRDMDTHKKTRLRNNLKRRRGCHLEAYETQVMNRFQKRSCHPEMFQRYACSRKRMQERLLECYSHPVFREFKFLVYNKTKSSEHRFMHRVFTTFKQPQTNLDKARCASGSMRMNALKEVHKHQDITIGWDKSFTIKKNTVTYYFNKYNKYFVNSLFIHTKFLPYDPSFFTKNVKFIKNLSTEIFNSTIIECFRSNDANKLAPLFQDAPRTEKPMLLYTTSNDFRSFKNNDVFEIDTAFPMKLMMFEDQLSMNMQSIRCRLLIPKNTPLIAFNSQVYLNAKHKFLVRDNAKEIIYYNGKYMSNSTTSVPKEQPSFSSICPADFRFYKTITVVDLILLED

SEQ ID NO: 3843 - DNA, 7166 bp, unidentified
  source 1..7166: mol_type = other DNA; note = NW_005434329.3
atcactcgttccggcatagcctagtgcgaagcacgcaggcgagcaagcgcagcttgccatatcccacgactctattattccttagtttagtggctactgtctggggaaaatggggaaaatggggaaaatggggaaaatggggaaggttttcaatccttttttcaaaaatcaaaatttttttttcacgctcaaatttttttctcgtatacacgaaaaactttctaaaatcttccccattttccccattttccccatttcctctatttcagactaaatttagagaggtttagtaattagtatggtaattttttccttattcatcatcatctgaatcaaccattccattgtaaggatggtctcttacagatatgtgcttgaagccatttgattgtttattatcaacaattatatgtttatccgaataaggaccagctagtttgttccttatgatatattccttcacttgggatggtgtcagcgaggtggtatgtttacatttcttcaattctgtttttatagtgctcatgtgcaggcctgttgaagtggtatcatattggaacatttcacagaagataacgttcagatctacagtgcctctctcaggttttagtgacgaagaatctcttaatacacactctggaatatttaaattatctctaaagctctctagtattatctgtgtaaaagccagtacattctcttctcttgttatccattctttcaagtttttatctgctagtttccagaatgatgggatcgtgatgtcttgttccctataattcataaactcttgttctggttggaattttgatggaaacaatatgccaactagagtttcataagtgtcgacaggatcaacttctggaaattcattgcaaaagaaaaaaggaactgcattatggttcatctctctttcatctacaaagttctttcttacttgcactgaatctccaccagtcatcatcttaataagactcccatcaatcctctctttttttgatgattgtcttatctcgtttgtatatgtaaatctaacgtcatcccatgaagccatgaaggataaggcttttgcttcgtcttgtgattgatgtcttctttgaattaatgaagcaagattgaaagtttgtgtaaacccttcaaatgacttcttcatcatgttgcatatcaaacccttgccacagtttctttcccctttacatatgaaccatttcttatcattgctaaaacctgctatcgttcttgacaaacaaccaagaaagaatttttgttgttcaatgtctggaaggattgggtctatcaccttctcataaaacgtcttcatcactgcttcatcatttatcatcttcaagtcatacgatattattcttgtgaagtgaatgtctctgttgtatgcttcatcgaatgacagtagtcttctgtccctgaatgaatatatcccattattaaatggtaagtatcccacatttgaactcttcatcctgttcaaaaactgttcgtccttgaaacacttcgcatcttgatggtccgttgtggtctttactgccctcttcacatttgactcgttgtttgagtatggtttcatcacccctgactccatatacattatatctaggttgtagtatagttgtgctattgcacgattgacagccttgctatcagatatccatatctttccattgtagtgatagaacgtgttgttcgaaaatttgaaacaacccttaaatctctctttgaatatcctgaaagcacctaaatcatcattcttatcttgaatcagattatcaatctcctcctttatcgtcatatactcgtcaaagggttttaccttcaactttatctctatccccgtcctctgctttatgaactcctcatacttcgtcatgtctctcatcctctcctcattctcctctgtccatggcacttgaagcccatcgtgaatcaatacacacttgtacccattcttgaacgctgggatcaccccatcctctatcagctttaaagttgtttgcgtttttatgttgggacacttattttttgtacttgaatatgtaatgatgtattctagaacttatccggctggtgaggtcattgcagctcttgaaacctataatagggtcaaaagtcttaggaaggcctcgtatatcactggtattagcaaatccaccattcatagatggtggaccaatcttagaacagttattagacgcaaggataagcgcaaacgacgtttcaagcgtcgtcataagtatcctcatctagatgatgttataaagcacctcttctgccaaaacaaagatctcgccttcatgcatctaaagcaaatccaatacacattgaatctatcttatggcatctcttcctccttgacatctattcatagaatccttaaaaatgtaagatatcaaggcgccgtttcaacattcaccatatcaatccaacaaatccaagtgatagaaaggccaggttttcagacttcaaagcctcaatagatttattcttgaacgacaatatcgtttgtctggatgagacctcattctgcaatgttggcaaccctttttatggctacttccccaagggaagacaacccaacgcaatcaaggtatcaaaacgtgaaagagtatcattggtcatggctgttcacccttctcttggcattgtttcttataaacgtgtaaacaaggcctttacaaaggcttcattcttagtttttttatagggtcttattcctaagcttcctaagagcacaaaagccatccttatggataatgtggccttccataggtctaaagaggttgttggcttgttggaacaacatggtcttaccccactttatattcctccatactcaccacgatgcaatcccattgaggaggtcttctctctattgaagagggcttttagaaccaagacaacaaataatagcatggtagaccgtattgaagaggcaatcgacatcataaaaggatataaggctttggatcataattataaacatacaagagactatgttagagaggaatgtcaaacattaggattgtaaaacgaaaggccaagggcttcttcaagtcggaggaccttgttacaatcaaggatgctgtcaagcatgctcataggatcatgtcagatgcgtccatactcatccgatcatattacctgcgatggttccagagctcataccctcttgagtcagatggcaaagaacttgagcttgagcacttccatatatccatggcctgtagcatagtccaaggcataacaaggcctccagtccgtggtgttggtcctgaacgatctgctaagataactatcttcaacgacatgttagatgagcacaagaagctgtatgaacgtcttccgaatgataaagggttcgaaacagacctctctctatcacatatcttagcatactctatcgacaacctccttaccgcgtataaaaacaacatcgagacccacttcttgaaatacaccaaacgttatatcctatgtgacatgctggctaagaatatggataagtccgaagcaaggagagtggctgctatatacaccaacgtttatatgtacgacgcaacactcgacctacaaccagatttgatgctaaaatatggtctccatgatgccagctactcgttcctatttccacctaagataaaggaggatgctcctagagtttatgatctaaaggcaaacccatgggtctatctgcctaagatggttatgataaatcaggccttagagacagacttcctaactgtgatgcacaaggagaggaggctgctcaatccattgcctttctattcatcgtttgtcccgatgcacatacggattgatacatccggcttatcgcagctgctgatgactaaggaccgtattgatgacttcaagagattttatcttgctgagtttggagtaagtctgaatatatcaaccaaggctaatatgctagcaagttttgagaagatctttggacggaaagcaacatcgaacagggaggccgggctgtacgcaacagagatgtggagcttcttgacaaacctaaagacgtgccgacaatggaaggagcttgacggggtggttcgtaagaacgatcctaagagaacacaatggatgtttgataatgcggttgtaacggatggtgtgtccatctcattccaggtcattgataacaacatgttcggacgtaaggtcttctcatccaagaagaaagcaacaacatgtgagaaggatgatgaacaagatagcaaggaagttacaaaagaagatctaaagacatcgaagctattgggttgtgatccaggaaagagagacatcctagccataacagatggagtcaagacaatctgttacaccaaggggcagcgagacatggacactcataagaaaacaagactgagaaacaatctaaagcggcgcagagggtgtcacctagaagcatatgaaacacaggttatgaaccgattccagaaacgatcttgccatcccgagatgtttcaacgctatgcctgttccagaaagaggatgcaggaaaggctgcttgagtgctactctcatccagtctttagagagttcaagtttttggtttataacaagaccaagagctccgaacataggtttatgcatagagtgtttacaacattcaaacaaccgcagacaaacctggacaaggcaaggtgtgcttccggatctatgcgcatgaacgctttgaaggaggtccataagcaccaagacataactatcggatggggtgactggggaaggaatccgaacacgctaagatgctcaataggaccaacaccaggaattggaataaggagacggtttgaatcattattcaatacaaaaacagtgccagagcactatacctccaaggaatgtccaagttgcaaggaacgaaccttgacaaagactacatgcaattcgatcacaagacaccatctgcttcgttgtacaaacgatagctgcagcaggtggtggaatcggaatgtagctggagcgttcaacatcctaaaaaggctgttggatggccaaacactgtccggtaatgaaactaccggagacgggttaggaggtggcgacctctgagacctagaacttagagtgcgaaaacgccattactattgtgatgcctattcaatggtgttgcctttggcaagctctgcttcccaagtgtaaaaagaaagcactctaaatcgaaacttgataagataagacgaagacatgaagcgaaaaatgaatatattagtgatgatcacaaggccttgtgtgataaatataggttgtacaatgaattagtgaataatagcaaggctaaaactataacagaatcttatgatattgttgaaatagcagacaaatcattcaccataaaaaagaacactgttacatactatttcaacaagtacaataagtattttgtaaactcattgttcattcacacaaaattcttgccatatgacccatcattcttcacaaagaatgttaaatttatcaagaacctttctactgaaatcttcaacagcactattatcgaatgtttcagaagcaacgatgcaaacaagctagcaccactctttcaggatgctccaaggactgaaaaacccatgctgctgtatacaacgtcaaatgacttcagatccttcaagaataatgatgtgtttgagatcgacacagcgttcccaatgaaactcatgatgtttgaagatcaattgagcatgaacatgcaatccattcgatgcaggctccttattccaaagaacacccctttgatagctttcaacagtcaggtgtacctcaacgctaaacataaatttcttgttagagataatgccaaggagatcatctattacaatggaaagtatatgagcaattcaacaacatctgttcccaaagaacaaccatcatttagcagcatctgccccgctgattttagattctacaaaacaatcactgtcgttgacctgatccttcttgaagactagcatatgccgtgcgctcacaaaaaatgcctttatcataataatggcatacacatgctttgtttttcaatagtcttgacatgacttgacatgatcaccaggcatattttgtcatgatcttccacttgttcattcaaaaatgaatgtattccatctatcctattcaactcacaatggacttctccaatcactgttggtgtttggtgtgaattgtgagatatatgctcaggatcttgtggaagagaaggggagagagcatggcattacagattcagatatattgttcactcacaatcggctgtttgagttgcatgcggaattacatgagagccataggaggatggaagactatatggaaaagcagcagaggcataatgaggaggcgctgtttagagggccatcggatcgtgacaagagacaatggttgtaccttcaatatctgataagatacgaggatgctttcagcagaaacctgctagagagattggagaccgagagcaatacgagtgtgtatgaatttggatgaataagcaaataattttgaagtgaaaataaaaatatattttattgattgggaaatagttgttgatgagcgtgtaattcttaggatctcgcttgtggttcattggtttttgcttgtggttcatttgagtatttctgaatccatttgcgaacagcattatcagaaaccccatatttctttccgacttgcagatatgattgcaactcattgaaatctcttagaagctgttcatacgagggtctattcttgacctttgcgttacgaatatgatggcatttgatgcatctttgagaacccttataaacaattgctttacaatctatacagtaatcgcactcattgtttgttttagctgatgacaatgatatctttccatcggttacagtaattgttttatcttttattacagttgattttgtgtttattggtcgttgtttttctggtttttgaatgttcttcttattcttagatctatatgtatctgtcaatgcatggcatgttgcgcacaggaattctagattctcaatgcgattatcattgttgatgccgttcttgtgttcaaggtgaagcttgatgggtgcatcttcattcaacttattagagaatcttgtttggccacaatgattgcatttatgcgaccatttcttttctgtgatcaatctcctcag

SEQ ID NO: 3844 - RNA, 89 nt, Spizellomyces punctatus
  source 1..89: mol_type = other RNA
gttttccgagccggttgtcgcgcggttcaatccctggtgcgggtgctagtgccaatacccaccggctccgcactatctataggttatga

SEQ ID NO: 3845 - RNA, 153 nt, Guillardia theta; identical to SEQ ID NO: 630
  source 1..153: mol_type = other RNA

SEQ ID NO: 3846 - RNA, 164 nt, Naegleria lovaniensis
  source 1..164: mol_type = other RNA
gagcaccttgtgtgttgggtcttccccaccttgtgtgcgttgggtcctttcccctggctttcactctttgagtgtttgcttgcaagatcagcactttgttcgatttgtttgttttgttcaaattgttgatttaaataaaggcgacattcttcatctctcaaacc

SEQ ID NO: 3847 - RNA, 111 nt, Mercenaria mercenaria
  source 1..111: mol_type = other RNA
tcgggtcgattctatccccagggctcgaatgcatttttgtcacagattttgccaatgcaagatctgggggcaagaatgtctccgggtgaaaagagtcaggctggaaagatt

SEQ ID NO: 3848 - DNA, 41 bp, synthetic construct
  misc_feature 1..41: note = Synthetic
  source 1..41: mol_type = other DNA
atcgcatagagaagtcatttaataaggccactgttaaaaag

SEQ ID NO: 3849 - DNA, 41 bp, synthetic construct
  source 1..41: mol_type = other DNA
  misc_feature 1..41: note = Synthetic
ctttttaacagtggccttattaaatgacttctctatgcgat

SEQ ID NO: 3850 - DNA, 41 bp, synthetic construct
  misc_feature 1..41: note = Synthetic
  source 1..41: mol_type = other DNA
catttaaggagaagtcatttaataaggccactgttaaaaag

SEQ ID NO: 3851 - DNA, 41 bp, synthetic construct
  misc_feature 1..41: note = Synthetic
  source 1..41: mol_type = other DNA
ctttttaacagtggccttattaaatgacttctccttaaatg

SEQ ID NO: 3852 - DNA, 41 bp, synthetic construct
  misc_feature 1..41: note = Synthetic
  source 1..41: mol_type = other DNA
cgaacccggagaagtcatttaataaggccactgttaaaaag

SEQ ID NO: 3853 - DNA, 41 bp, synthetic construct
  misc_feature 1..41: note = Synthetic
  source 1..41: mol_type = other DNA
ctttttaacagtggccttattaaatgacttctccgggttcg

SEQ ID NO: 3854 - DNA, 41 bp, synthetic construct
  source 1..41: mol_type = other DNA
  misc_feature 1..41: note = Synthetic
acgcttaggagaagtcatttaataaggccactgttaaaaag

SEQ ID NO: 3855 - DNA, 41 bp, synthetic construct
  misc_feature 1..41: note = Synthetic
  source 1..41: mol_type = other DNA
ctttttaacagtggccttattaaatgacttctcctaagcgt

SEQ ID NO: 3856 - DNA, 30 bp, Homo sapiens
  source 1..30: mol_type = other DNA
gcataactcttgagtgatgtgttaaggaat

SEQ ID NO: 3857 - DNA, 30 bp, Homo sapiens
  source 1..30: mol_type = other DNA
cgtattgagaactcactacacaattcctta

SEQ ID NO: 3858 - DNA, 25 bp, Homo sapiens
  source 1..25: mol_type = other DNA
actcttgagtgatgtgttaaggaat

SEQ ID NO: 3859 - DNA, 22 bp, Homo sapiens
  source 1..22: mol_type = other DNA
actcttgagtgatttaaggaat

SEQ ID NO: 3860 - DNA, 22 bp, Homo sapiens
  source 1..22: mol_type = other DNA
actcttgagtgatataaggaat

SEQ ID NO: 3861 - RNA, 75 nt, synthetic construct; identical to SEQ ID NO: 566
  source 1..75: mol_type = other RNA
  misc_feature 1..75: note = Synthetic

SEQ ID NO: 3862 - RNA, 74 nt, synthetic construct
  source 1..74: mol_type = other RNA
  misc_feature 1..74: note = Synthetic
cttttccgaaccggttgtcgccggtttattccctggtgtagtagctagtgccagtttctgtcacctctacacta

SEQ ID NO: 3863 - RNA, 75 nt, synthetic construct; identical to SEQ ID NO: 566
  misc_feature 1..75: note = Synthetic
  source 1..75: mol_type = other RNA

SEQ ID NO: 3864 - RNA, 81 nt, synthetic construct
  source 1..81: mol_type = other RNA
  misc_feature 1..81: note = Synthetic
agaaaacatgaggatcacccatgtctgcagttttccgagccggttgtcgcgcggttcaatccctggtgccaatacccacta

SEQ ID NO: 3865 - RNA, 103 nt, synthetic construct
  misc_feature 1..103: note = Synthetic
  source 1..103: mol_type = other RNA
agcgtagaacgtagattggttagattaggttttccgagccggttgtcgcgcggttcaatccctggtgcgggtgctagtgccaatacccaccggctccgcacta

SEQ ID NO: 3866 - RNA, 102 nt, synthetic construct
  source 1..102: mol_type = other RNA
  misc_feature 1..102: note = Synthetic
gtataattgcctagtagtagttagttagcttttacgagccagtttacgctggtttattccctggtgtagtagctagtgccagtttctgtcacctctacacta

SEQ ID NO: 3867 - RNA, 113 nt, Sphenodon punctatus
  source 1..113: mol_type = other RNA
tagaacgtagattggttagattaggttttccgagccggttgtcgcgcggttcaatccctggtgcgggtgctagtgccaatacccaccggctccgcactatctataggttatga

SEQ ID NO: 3868 - RNA, 106 nt, Sphenodon punctatus
  source 1..106: mol_type = other RNA
tagattggttagattaggttttccgagccggttgtcgccggttcaatccctggtgcgggtgctagtgccaatacccaccggctccgcactatatatagaatacttt

SEQ ID NO: 3869 - RNA, 111 nt, Sphenodon punctatus
  source 1..111: mol_type = other RNA
tagcgtagattggttagattaggttttccgagccggttgtcgcgcggttcaatccctggtgcgggtgctagtgccaatacccaccggctccgcactaagaactagaacgac

SEQ ID NO: 3870 - RNA, 116 nt, Sphenodon punctatus
  source 1..116: mol_type = other RNA
tagcgtagattggttagattagattaggttttccgagccggttgtcgcgcggttcaatccctggtgcgggtgctagtgccaatacccaccggctccgcactactatagcatcgtta

SEQ ID NO: 3871 - DNA, 35 bp, Homo sapiens
  source 1..35: mol_type = other DNA
catgtagactcttgagtgatgtgttaaggaatgct

SEQ ID NO: 3872 - DNA, 31 bp, Homo sapiens
  source 1..31: mol_type = other DNA
catgtagactcttgatgtgttaaggaatgct

SEQ ID NO: 3873 - DNA, 30 bp, Homo sapiens
  source 1..30: mol_type = other DNA
catgtagactcttgagtgataaggaatgct

SEQ ID NO: 3874 - DNA, 32 bp, Homo sapiens
  source 1..32: mol_type = other DNA
catgtagactcttgagtgatgtgaggaatgct

SEQ ID NO: 3875 - DNA, 28 bp, Homo sapiens
  source 1..28: mol_type = other DNA
catgtagactcttgtgttaaggaatgct

SEQ ID NO: 3876 - DNA, 33 bp, Homo sapiens
  source 1..33: mol_type = other DNA
catgtagactcttgagatgtgttaaggaatgct

SEQ ID NO: 3877 - DNA, 34 bp, Homo sapiens
  source 1..34: mol_type = other DNA
catgtagactcttgagtgtgtgttaaggaatgct

SEQ ID NO: 3878 - DNA, 30 bp, Homo sapiens
  source 1..30: mol_type = other DNA
catgtagactcttgtgtgttaaggaatgct

SEQ ID NO: 3879 - DNA, 36 bp, Homo sapiens
  source 1..36: mol_type = other DNA
catgtagactcttgagtgagtgtgttaaggaatgct

SEQ ID NO: 3880 - DNA, 35 bp, Homo sapiens
  source 1..35: mol_type = other DNA
accgtcacctgtctccaagccagcgacgcagtgcc

SEQ ID NO: 3881 - DNA, 31 bp, Homo sapiens
  source 1..31: mol_type = other DNA
accgtcacctgtctccaagccacgcagtgcc

SEQ ID NO: 3882 - DNA, 32 bp, Homo sapiens
  source 1..32: mol_type = other DNA
accgtcacctgtctccaagccaacgcagtgcc

SEQ ID NO: 3883 - DNA, 27 bp, Homo sapiens
  source 1..27: mol_type = other DNA
accgtcacctgtctccaagccagtgcc

SEQ ID NO: 3884 - DNA, 30 bp, Homo sapiens
  source 1..30: mol_type = other DNA
accgtcacctgtctccaagcacgcagtgcc

SEQ ID NO: 3885 - DNA, 30 bp, Homo sapiens
  source 1..30: mol_type = other DNA
accgtcacctgtctccaagcccgcagtgcc

SEQ ID NO: 3886 - DNA, 29 bp, Homo sapiens
  source 1..29: mol_type = other DNA
accgtcacctgtctccaagacgcagtgcc

SEQ ID NO: 3887 - DNA, 29 bp, Homo sapiens
  source 1..29: mol_type = other DNA
accgtcacctgtctccaagccgcagtgcc

SEQ ID NO: 3888 - DNA, 26 bp, Homo sapiens
  source 1..26: mol_type = other DNA
accgtcacctgtctccaagcagtgcc

SEQ ID NO: 3889 - DNA, 35 bp, Homo sapiens
  source 1..35: mol_type = other DNA
ttagagtctcgtgatgtttaagaaggcatgcacta

SEQ ID NO: 3890 - DNA, 32 bp, Homo sapiens
  source 1..32: mol_type = other DNA
ttagagtctcgtgatgtttaaggcatgcacta

SEQ ID NO: 3891 - DNA, 31 bp, Homo sapiens
  source 1..31: mol_type = other DNA
ttagagtctcgtgatgtttaggcatgcacta

SEQ ID NO: 3892 - DNA, 31 bp, Homo sapiens
  source 1..31: mol_type = other DNA
ttagagtctcgtgatgtttaagcatgcacta

SEQ ID NO: 3893 - DNA, 33 bp, Homo sapiens
  source 1..33: mol_type = other DNA
ttagagtctcgtgatgtttaaaggcatgcacta

SEQ ID NO: 3894 - DNA, 33 bp, Homo sapiens
  source 1..33: mol_type = other DNA
ttagagtctcgtgatgtttaagagcatgcacta

SEQ ID NO: 3895 - DNA, 30 bp, Homo sapiens
  source 1..30: mol_type = other DNA
ttagagtctcgtgatgtttagcatgcacta

SEQ ID NO: 3896 - DNA, 32 bp, Homo sapiens
  source 1..32: mol_type = other DNA
ttagagtctcgtgatgttgaaggcatgcacta

SEQ ID NO: 3897 - DNA, 34 bp, Homo sapiens
  source 1..34: mol_type = other DNA
ttagagtctcgtgatgttttgaaggcatgcacta

SEQ ID NO: 3898 - DNA, 15 bp, synthetic construct
  source 1..15: mol_type = other DNA
  misc_feature 1..15: note = Synthetic
cggtacccgggcata

SEQ ID NO: 3899 - DNA, 30 bp, synthetic construct
  source 1..30: mol_type = other DNA
  misc_feature 1..30: note = Synthetic
attaaatgacttctctatgcccgggtaccg

SEQ ID NO: 3900 - RNA, 90 nt, synthetic construct
  misc_feature 1..90: note = Synthetic
  source 1..90: mol_type = other RNA
gttttccgagccggttgtcgcgcggttcaatccctggtgcgggtgctagtgccaatacccaccggctccgcactatctataggttatgaa

SEQ ID NO: 3901 - RNA, 113 nt, synthetic construct
  source 1..113: mol_type = other RNA
  misc_feature 1..113: note = Synthetic
atccggtaacgaaactaccggagacgggttaggaggtgacgacctctaaaacctagaacttagagtgcaaaaacgccattacgattgtgatgcctattcaagggtgtcccaag

SEQ ID NO: 3902 - RNA, 33 nt, synthetic construct
  misc_feature 1..33: note = Synthetic
  source 1..33: mol_type = other RNA
tgtaaaaagaaagcactctaagaagaagtcatc

SEQ ID NO: 3903 - RNA, 90 nt, synthetic construct; identical to SEQ ID NO: 3900
  source 1..90: mol_type = other RNA
  misc_feature 1..90: note = Synthetic

SEQ ID NO: 3904 - RNA, 60 nt, synthetic construct
  misc_feature 1..60: note = Synthetic
  source 1..60: mol_type = other RNA
ttatccaccaaagttatcgctttggtcaattaatgcaggtaagcaacatccagcagagct

SEQ ID NO: 3905 - DNA, 10 bp, synthetic construct
  misc_feature 1..10: note = Synthetic
  source 1..10: mol_type = other DNA
ccccctcccc

SEQ ID NO: 3906 - RNA, 10159 nt, Saccharomyces cerevisiae
  source 1..10159: mol_type = other RNA
gacgaaagggcctcgtgatacgcctatttttataggttaatgtcatgataataatggtttcttagtatgatccaatatcaaaggaaatgatagcattgaaggatgagactaatccaattgaggagtggcagcatatagaacagctaaagggtagtgctgaaggaagcatacgataccccgcatggaatgggataatatcacaggaggtactagactacctttcatcctacataaatagacgcatataagtacgcatttaagcataaacacgcactatgccgttcttctcatgtatatatatatacaggcaacacgcagatataggtgcgacgtgaacagtgagctgtatgtgcgcagctcgcgttgcattttcggaagcgctcgttttcggaaacgctttgaagttcctattccgaagttcctattctctagaaagtataggaacttcagagcgcttttgaaaaccaaaagcgctctgaagacgcactttcaaaaaaccaaaaacgcaccggactgtaacgagctactaaaatattgcgaataccgcttccacaaacattgctcaaaagtatctctttgctatatatctctgtgctatatccctatataacctacccatccacctttcgctccttgaacttgcatctaaactcgacctctacattttttatgtttatctctagtattactctttagacaaaaaaattgtagtaagaactattcatagagtgaatcgaaaacaatacgaaaatgtaaacatttcctatacgtagtatatagagacaaaatagaagaaaccgttcataattttctgaccaatgaagaatcatcaacgctatcactttctgttcacaaagtatgcgcaatccacatcggtatagaatataatcggggatgcctttatcttgaaaaaatgcacccgcagcttcgctagtaatcagtaaacgcgggaagtggagtcaggctttttttatggaagagaaaatagacaccaaagtagccttcttctaaccttaacggacctacagtgcaaaaagttatcaagagactgcattatagagcgcacaaaggagaaaaaaagtaatctaagatgctttgttagaaaaatagcgctctcgggatgcatttttgtagaacaaaaaagaagtatagattctttgttggtaaaatagcgctctcgcgttgcatttctgttctgtaaaaatgcagctcagattctttgtttgaaaaattagcgctctcgcgttgcatttttgttttacaaaaatgaagcacagattcttcgttggtaaaatagcgctttcgcgttgcatttctgttctgtaaaaatgcagctcagattctttgtttgaaaaattagcgctctcgcgttgcatttttgttctacaaaatgaagcacagatgcttcgttcaggtggcacttttcggggaaatgtgcgcggaacccctatttgtttatttttctaaatacattcaaatatgtatccgctcatgagacaataaccctgataaatgcttcaataatattgaaaaaggaagagtatgagtattcaacatttccgtgtcgcccttattcccttttttgcggcattttgccttcctgtttttgctcacccagaaacgctggtgaaagtaaaagatgctgaagatcagttgggtgcacgagtgggttacatcgaactggatctcaacagcggtaagatccttgagagttttcgccccgaagaacgttttccaatgatgagcacttttaaagttctgctatgtggcgcggtattatcccgtattgacgccgggcaagagcaactcggtcgccgcatacactattctcagaatgacttggttgagtactcaccagtcacagaaaagcatcttacggatggcatgacagtaagagaattatgcagtgctgccataaccatgagtgataacactgcggccaacttacttctgacaacgatcggaggaccgaaggagctaaccgcttttttgcacaacatgggggatcatgtaactcgccttgatcgttgggaaccggagctgaatgaagccataccaaacgacgagcgtgacaccacgatgcctgtagcaatggcaacaacgttgcgcaaactattaactggcgaactacttactctagcttcccggcaacaattaatagactggatggaggcggataaagttgcaggaccacttctgcgctcggcccttccggctggctggtttattgctgataaatctggagccggtgagcgtgggtctcgcggtatcattgcagcactggggccagatggtaagccctcccgtatcgtagttatctacacgacggggagtcaggcaactatggatgaacgaaatagacagatcgctgagataggtgcctcactgattaagcattggtaactgtcagaccaagtttactcatatatactttagattgatttaaaacttcatttttaatttaaaaggatctaggtgaagatcctttttgataatctcatgaccaaaatcccttaacgtgagttttcgttccactgagcgtcagaccccgtagaaaagatcaaaggatcttcttgagatcctttttttctgcgcgtaatctgctgcttgcaaacaaaaaaaccaccgctaccagcggtggtttgtttgccggatcaagagctaccaactctttttccgaaggtaactggcttcagcagagcgcagataccaaatactgttcttctagtgtagccgtagttaggccaccacttcaagaactctgtagcaccgcctacatacctcgctctgctaatcctgttaccagtggctgctgccagtggcgataagtcgtgtcttaccgggttggactcaagacgatagttaccggataaggcgcagcggtcgggctgaacggggggttcgtgcacacagcccagcttggagcgaacgacctacaccgaactgagatacctacagcgtgagctatgagaaagcgccacgcttcccgaagggagaaaggcggacaggtatccggtaagcggcagggtcggaacaggagagcgcacgagggagcttccagggggaaacgcctggtatctttatagtcctgtcgggtttcgccacctctgacttgagcgtcgatttttgtgatgctcgtcaggggggcggagcctatggaaaaacgccagcaacgcggcctttttacggttcctggccttttgctggccttttgctcacatgttctttcctgcgttatcccctgattctgtggataaccgtattaccgcctttgagtgagctgataccgctcgccgcagccgaacgaccgagcgcagcgagtcagtgagcgaggaagcggaagagcgcccaatacgcaaaccgcctctccccgcgcgttggccgattcattaatgcagctggcacgacaggtttcccgactggaaagcgggcagtgagcgcaacgcaattaatgtgagttagctcactcattaggcaccccaggctttacactttatgcttccggctcgtatgttgtgtggaattgtgagcggataacaatttcacacaggaaacagctatgaccatgattacgccaagcgcgcaattaaccctcactaaagggaacaaaagctggagctccaccgcggtggcggcccccgtcccaccatcgggcgcggatcatcacaagtttgtacaaaaaagcaggctctttggccatataggccaccaggtcctgcaggcgcgctcttcaggaggcgcgccaactgccctcttaattaacgaagaagatcggaccggggccgcggatctttgcaaagatccaaaaaaagcatgcgtacggattagaagccgccgagcgggtgacagccctccgaaggaagactctcctccgtgcgtcctcgtcttcaccggtcgcgttcctgaaacgcagatgtgcctcgcgccgcactgctccgaacaataaagattctacaatactagcttttatggttatgaagaggaaaattggcagtaacctggccccacaaacctcaaatgaacgaatcaaattaacaaccagatatctcgactgaaaaaaaaggtttaaaccagttccctgaaattattcccctacttgactaataagtatataaagacggtaggtattgattgtaattctgtaaatctatttcttaaacttcttgaattctacttttatagttagtcttttttttagttttaaaacaccaagaacttagtttcgaataaacacacataaataaaccatgaaatcttctcaccatcaccatcaccatcaccatcaccatggttcttctatgaaaatcgaagaaggtaaactggtaatctggattaacggcgataaaggctataacggtctcgctgaagtcggtaagaaattcgagaaagataccggaattaaagtcaccgttgagcatccggataaactggaagagaaattcccacaggttgcggcaactggcgatggccctgacattatcttctgggcacacgaccgctttggtggctacgctcaatctggcctgttggctgaaatcaccccggacaaagcgttccaggacaagctgtatccgtttacctgggatgccgtacgttacaacggcaagctgattgcttacccgatcgctgttgaagcgttatcgctgatttataacaaagatctgctgccgaacccgccaaaaacctgggaagagatcccggcgctggataaagaactgaaagcgaaaggtaagagcgcgctgatgttcaacctgcaagaaccgtacttcacctggccgctgattgctgctgacgggggttatgcgttcaagtatgaaaacggcaagtacgacattaaagacgtgggcgtggataacgctggcgcgaaagcgggtctgaccttcctggttgacctgattaaaaacaaacacatgaatgcagacaccgattactccatcgcagaagctgcctttaataaaggcgaaacagcgatgaccatcaacggcccgtgggcatggtccaacatcgacaccagcaaagtgaattatggtgtaacggtactgccgaccttcaagggtcaaccatccaaaccgttcgttggcgtgctgagcgcaggtattaacgccgccagtccgaacaaagagctggcaaaagagttcctcgaaaactatctgctgactgatgaaggtctggaagcggttaataaagacaaaccgctgggtgccgtagcgctgaagtcttacgaggaagagttggcgaaagatccacgtattgccgccactatggaaaacgcccagaaaggtgaaatcatgccgaacatcccgcagatgtccgctttctggtatgccgtgcgtactgcggtgatcaacgccgccagcggtcgtcagactgtcgatgaagccctgaaagacgcgcagactaattcgagctcgaacaacaacaacaataacaataacaacaacctcgggatcgaggaaaacctgtacttccaatccaatgcaccgccaaagaaaaagcaaaagcttgaaaaactcgacaaacctacttgcttacatacctgcaacaagacttcctttgcaaaagctttcttgccaaacgagacctaccggcagcgtcttctagattacatcgccatcatccatcaactcgctgaccacgcttcccacgctctcaaattctacatcctatctgcaccaacctttcccacggtaaatgaagatacaatcgaagcaattctctatcttctcaacaaaggagaggcttggcatccaagaaaggaagcaaagaaggcatggcgggattgtttgctgccatatgttcaacggtactgccaaatcgtcggctttgttcacccaaatctacgaggcgagcagcaatcagtcaattacctgacagcgagtatgatgacgaacctgaaagtcaacgttcaagagcatttcatgcagatgctccttcggtatatcaatctgcggctcgacgtgaagggacagaagcagcgactgccactgaaaagcgatgcgcggcaagctttctttactcagctacactacttgaagtcggttttccttttcgaaactatgccagaatcactggatgacttgagcattcttgaaaacgagattttagaagagatctggacacttaacctgccatttcctgatcaagacaagccgcttgcctacctcattgccatcgacgcgatgtccttctttcctgcatactgccgactgtcaaagttgttcgagcagcaaggttttcaacagttcagcgcgatacctctgcgccgctctctcatccaaagccatattcgcatcgacacggtcattctctacgcccacatcctctgcatcacccgccaagaagcagaagccgtagagaaggtcgatttatggttgcgcgtctgtaatctacgtaccaaagcttttcggtctcgctgtggtatgcattttgaaggctcgatcacgacagacggaacctcggtgtctgtatacctaaagcacccagaagctgacaagtacggaaagcgcggagcgagaaagtcagcaaaggctctagcagctgaggtgaaggcgctgtatgtggaaaacaacttatctgcttgtcaagagaacattgtcgttatcgatccaaacaagcgcgacattctctactgccaagacaacaagggcaccatcttccgttacaccgccaatcaacgctgcatggagactggaagccgtcgatttgcaaaagaacggcagcggatgaaagctggcggtattgacctcatagaatcacgtatcccaagccacaagacgatgaacctcatagacttcatgcgttaccttctcgttcgccgcgctgattgggatcgtcgaaaggagttctactcccaccctgctcatactcgatggaaatggcacgcattcataaaccgtcagaagagcgaatcagacctcatatccaacatgcgcaacaagtacggcgaaaacttcaccattgtgatgggtgattggagcgacgccggtcgaactgcgagatttcagacctcatcaaagacgaaaggttggcgcaccctctttaagcggaacaggatcaactgcttccttctcgacgagtacaagacctcatctgtctgccctcgctgtttggcctcatctgatgacttccttgaaaaggacttcaaaacacgacctcattcaagaccttggcgccgtcgcgaaggcaagattgaaaaagtccatggattgctgggttgtaccaaccctaactgtcagcaagcctggacgatgcgctactggaaccgagatacgctggcaacctgtaatatgctgacaatcgtgcaatcaatgttggatgggcacggtagaccagaggtgttcagcaggggtgttccagccgtagcgtagattggttagattagcttatccgagctggttgtcgccggttcaattcctggtgcgggtgctagtgccaatacccatcggctccgcactagatataaacgtttaacagaagaccaccatagttcatgtttgaatatcacatggactcttagttgcagcactaccctattattgtattctgcatttaaccttcgtcatcagcccatgtatttctactttaaaggaatgtgcttgaagaatagggatgccaatagaccggcacaggtaatggcggcaatgatgtagaaaatgctacggaaagcctaagcatttccacgctcctagaagaagaataccaacaaatgaatttttgcttttaaaaaaagatgaagggagtttaccggagaagtagggtagcggcttaagtcgactttgttcccactgtacttttagctcgtacaaaatacaatatacttttcatttctccgtaaacaacatgttttcccatgtaatatccttttctatttttcgttccgttaccaactttacacatactttatatagctattcacttctatacactaaaaaactaagacaattttaattttgctgcctgccatatttcaatttgttataaattcctataatttatcctattagtagctaaaaaaagatgaatgtgaatcgaatcctaagagaattcccctcgaagatcgatctggcggcccggccggccgcggccgcactcgagatatctagacccagctttcttgtacaaagtggtgatagcttgtcgagaagtactcgagggggggcccggtacccaattcgccctatagtgagtcgtattacgcgcgctcactggccgtcgttttacaacgtcgtgactgggaaaaccctggcgttacccaacttaatcgccttgcagcacatccccctttcgccagctggcgtaatagcgaagaggcccgcaccgatcgcccttcccaacagttgcgcagcctgaatggcgaatggacgcgccctgtagcggcgcattaagcgcggcgggtgtggtggttacgcgcagcgtgaccgctacacttgccagcgccctagcgcccgctcctttcgctttcttcccttcctttctcgccacgttcgccggctttccccgtcaagctctaaatcgggggctccctttagggttccgatttagtgctttacggcacctcgaccccaaaaaacttgattagggtgatggttcacgtagtgggccatcgccctgatagacggtttttcgccctttgacgttggagtccacgttctttaatagtggactcttgttccaaactggaacaacactcaaccctatctcggtctattcttttgatttataagggattttgccgatttcggcctattggttaaaaaatgagctgatttaacaaaaatttaacgcgaattttaacaaaatattaacgcttacaatttcctgatgcggtattttctccttacgcatctgtgcggtatttcacaccgcatagggtaataactgatataattaaattgaagctctaatttgtgagtttagtatacatgcatttacttataatacagttttttagttttgctggccgcatcttctcaaatatgcttcccagcctgcttttctgtaacgttcaccctctaccttagcatcccttccctttgcaaatagtcctcttccaacaataataatgtcagatcctgtagagaccacatcatccacggttctatactgttgacccaatgcgtctcccttgtcatctaaacccacaccgggtgtcataatcaaccaatcgtaaccttcatctcttccacccatgtctctttgagcaataaagccgataacaaaatctttgtcgctcttcgcaatgtcaacagtacccttagtatattctccagtagatagggagcccttgcatgacaattctgctaacatcaaaaggcctctaggttcctttgttacttcttctgccgcctgcttcaaaccgctaacaatacctgggcccaccacaccgtgtgcattcgtaatgtctgcccattctgctattctgtatacacccgcagagtactgcaatttgactgtattaccaatgtcagcaaattttctgtcttcgaagagtaaaaaattgtacttggcggataatgcctttagcggcttaactgtgccctccatggaaaaatcagtcaagatatccacatgtgtttttagtaaacaaattttgggacctaatgcttcaactaactccagtaattccttggtggtacgaacatccaatgaagcacacaagtttgtttgcttttcgtgcatgatattaaatagcttggcagcaacaggactaggatgagtagcagcacgttccttatatgtagctttcgacatgatttatcttcgtttcctgcaggtttttgttctgtgcagttgggttaagaatactgggcaatttcatgtttcttcaacactacatatgcgtatatataccaatctaagtctgtgctccttccttcgttcttccttctgttcggagattaccgaatcaaaaaaatttcaaggaaaccgaaatcaaaaaaaagaataaaaaaaaaatgatgaattgaaaaggtggtatggtgcactctcagtacaatctgctctgatgccgcatagttaagccagccccgacacccgccaacacccgctgacgcgccctgacgggcttgtctgctcccggcatccgcttacagacaagctgtgaccgtctccgggagctgcatgtgtcagaggttttcaccgtcatcaccgaaacgcgcga

SEQ ID NO: 3907 - RNA, 10132 nt, Saccharomyces cerevisiae
  source 1..10132: mol_type = other RNA
gacgaaagggcctcgtgatacgcctatttttataggttaatgtcatgataataatggtttcttagtatgatccaatatcaaaggaaatgatagcattgaaggatgagactaatccaattgaggagtggcagcatatagaacagctaaagggtagtgctgaaggaagcatacgataccccgcatggaatgggataatatcacaggaggtactagactacctttcatcctacataaatagacgcatataagtacgcatttaagcataaacacgcactatgccgttcttctcatgtatatatatatacaggcaacacgcagatataggtgcgacgtgaacagtgagctgtatgtgcgcagctcgcgttgcattttcggaagcgctcgttttcggaaacgctttgaagttcctattccgaagttcctattctctagaaagtataggaacttcagagcgcttttgaaaaccaaaagcgctctgaagacgcactttcaaaaaaccaaaaacgcaccggactgtaacgagctactaaaatattgcgaataccgcttccacaaacattgctcaaaagtatctctttgctatatatctctgtgctatatccctatataacctacccatccacctttcgctccttgaacttgcatctaaactcgacctctacattttttatgtttatctctagtattactctttagacaaaaaaattgtagtaagaactattcatagagtgaatcgaaaacaatacgaaaatgtaaacatttcctatacgtagtatatagagacaaaatagaagaaaccgttcataattttctgaccaatgaagaatcatcaacgctatcactttctgttcacaaagtatgcgcaatccacatcggtatagaatataatcggggatgcctttatcttgaaaaaatgcacccgcagcttcgctagtaatcagtaaacgcgggaagtggagtcaggctttttttatggaagagaaaatagacaccaaagtagccttcttctaaccttaacggacctacagtgcaaaaagttatcaagagactgcattatagagcgcacaaaggagaaaaaaagtaatctaagatgctttgttagaaaaatagcgctctcgggatgcatttttgtagaacaaaaaagaagtatagattctttgttggtaaaatagcgctctcgcgttgcatttctgttctgtaaaaatgcagctcagattctttgtttgaaaaattagcgctctcgcgttgcatttttgttttacaaaaatgaagcacagattcttcgttggtaaaatagcgctttcgcgttgcatttctgttctgtaaaaatgcagctcagattctttgtttgaaaaattagcgctctcgcgttgcatttttgttctacaaaatgaagcacagatgcttcgttcaggtggcacttttcggggaaatgtgcgcggaacccctatttgtttatttttctaaatacattcaaatatgtatccgctcatgagacaataaccctgataaatgcttcaataatattgaaaaaggaagagtatgagtattcaacatttccgtgtcgcccttattcccttttttgcggcattttgccttcctgtttttgctcacccagaaacgctggtgaaagtaaaagatgctgaagatcagttgggtgcacgagtgggttacatcgaactggatctcaacagcggtaagatccttgagagttttcgccccgaagaacgttttccaatgatgagcacttttaaagttctgctatgtggcgcggtattatcccgtattgacgccgggcaagagcaactcggtcgccgcatacactattctcagaatgacttggttgagtactcaccagtcacagaaaagcatcttacggatggcatgacagtaagagaattatgcagtgctgccataaccatgagtgataacactgcggccaacttacttctgacaacgatcggaggaccgaaggagctaaccgcttttttgcacaacatgggggatcatgtaactcgccttgatcgttgggaaccggagctgaatgaagccataccaaacgacgagcgtgacaccacgatgcctgtagcaatggcaacaacgttgcgcaaactattaactggcgaactacttactctagcttcccggcaacaattaatagactggatggaggcggataaagttgcaggaccacttctgcgctcggcccttccggctggctggtttattgctgataaatctggagccggtgagcgtgggtctcgcggtatcattgcagcactggggccagatggtaagccctcccgtatcgtagttatctacacgacggggagtcaggcaactatggatgaacgaaatagacagatcgctgagataggtgcctcactgattaagcattggtaactgtcagaccaagtttactcatatatactttagattgatttaaaacttcatttttaatttaaaaggatctaggtgaagatcctttttgataatctcatgaccaaaatcccttaacgtgagttttcgttccactgagcgtcagaccccgtagaaaagatcaaaggatcttcttgagatcctttttttctgcgcgtaatctgctgcttgcaaacaaaaaaaccaccgctaccagcggtggtttgtttgccggatcaagagctaccaactctttttccgaaggtaactggcttcagcagagcgcagataccaaatactgttcttctagtgtagccgtagttaggccaccacttcaagaactctgtagcaccgcctacatacctcgctctgctaatcctgttaccagtggctgctgccagtggcgataagtcgtgtcttaccgggttggactcaagacgatagttaccggataaggcgcagcggtcgggctgaacggggggttcgtgcacacagcccagcttggagcgaacgacctacaccgaactgagatacctacagcgtgagctatgagaaagcgccacgcttcccgaagggagaaaggcggacaggtatccggtaagcggcagggtcggaacaggagagcgcacgagggagcttccagggggaaacgcctggtatctttatagtcctgtcgggtttcgccacctctgacttgagcgtcgatttttgtgatgctcgtcaggggggcggagcctatggaaaaacgccagcaacgcggcctttttacggttcctggccttttgctggccttttgctcacatgttctttcctgcgttatcccctgattctgtggataaccgtattaccgcctttgagtgagctgataccgctcgccgcagccgaacgaccgagcgcagcgagtcagtgagcgaggaagcggaagagcgcccaatacgcaaaccgcctctccccgcgcgttggccgattcattaatgcagctggcacgacaggtttcccgactggaaagcgggcagtgagcgcaacgcaattaatgtgagttagctcactcattaggcaccccaggctttacactttatgcttccggctcgtatgttgtgtggaattgtgagcggataacaatttcacacaggaaacagctatgaccatgattacgccaagcgcgcaattaaccctcactaaagggaacaaaagctggagctccaccgcggtggcggcccccgtcccaccatcgggcgcggatcatcacaagtttgtacaaaaaagcaggctctttggccatataggccaccaggtcctgcaggcgcgctcttcaggaggcgcgccaactgccctcttaattaacgaagaagatcggaccggggccgcggatctttgcaaagatccaaaaaaagcatgcgtacggattagaagccgccgagcgggtgacagccctccgaaggaagactctcctccgtgcgtcctcgtcttcaccggtcgcgttcctgaaacgcagatgtgcctcgcgccgcactgctccgaacaataaagattctacaatactagcttttatggttatgaagaggaaaattggcagtaacctggccccacaaacctcaaatgaacgaatcaaattaacaaccagatatctcgactgaaaaaaaaggtttaaaccagttccctgaaattattcccctacttgactaataagtatataaagacggtaggtattgattgtaattctgtaaatctatttcttaaacttcttgaattctacttttatagttagtcttttttttagttttaaaacaccaagaacttagtttcgaataaacacacataaataaaccatgaaatcttctcaccatcaccatcaccatcaccatcaccatggttcttctatgaaaatcgaagaaggtaaactggtaatctggattaacggcgataaaggctataacggtctcgctgaagtcggtaagaaattcgagaaagataccggaattaaagtcaccgttgagcatccggataaactggaagagaaattcccacaggttgcggcaactggcgatggccctgacattatcttctgggcacacgaccgctttggtggctacgctcaatctggcctgttggctgaaatcaccccggacaaagcgttccaggacaagctgtatccgtttacctgggatgccgtacgttacaacggcaagctgattgcttacccgatcgctgttgaagcgttatcgctgatttataacaaagatctgctgccgaacccgccaaaaacctgggaagagatcccggcgctggataaagaactgaaagcgaaaggtaagagcgcgctgatgttcaacctgcaagaaccgtacttcacctggccgctgattgctgctgacgggggttatgcgttcaagtatgaaaacggcaagtacgacattaaagacgtgggcgtggataacgctggcgcgaaagcgggtctgaccttcctggttgacctgattaaaaacaaacacatgaatgcagacaccgattactccatcgcagaagctgcctttaataaaggcgaaacagcgatgaccatcaacggcccgtgggcatggtccaacatcgacaccagcaaagtgaattatggtgtaacggtactgccgaccttcaagggtcaaccatccaaaccgttcgttggcgtgctgagcgcaggtattaacgccgccagtccgaacaaagagctggcaaaagagttcctcgaaaactatctgctgactgatgaaggtctggaagcggttaataaagacaaaccgctgggtgccgtagcgctgaagtcttacgaggaagagttggcgaaagatccacgtattgccgccactatggaaaacgcccagaaaggtgaaatcatgccgaacatcccgcagatgtccgctttctggtatgccgtgcgtactgcggtgatcaacgccgccagcggtcgtcagactgtcgatgaagccctgaaagacgcgcagactaattcgagctcgaacaacaacaacaataacaataacaacaacctcgggatcgaggaaaacctgtacttccaatccaatgcaccgccaaagaagaagcaaaagcttgaaaggctcaaaaaactcgacaaacccaccttacatacctgcaacaagacgtcctttgcaaaggctttcttgcctaatgagacctaccggcagcgtcttctagattacatcgccatcatccatcaactcgctgaccatgcttcccacgctctcaaattctacatcctctctacatccacatcgtctttcccggttgttcacgaagatacaatcgaagccattctctatcttctcaacaagggggaggcttggcatccaagaaaggaagcaaagaaggcatggcgggattgtttgttgccatatgttcaacggtactgccaaatcgtcggcttcattcatccaaatctacgaggcgagcagcagtcaattaattacctgacagtgagtatgatgacgaacctgaaagtcaacgttcaagagcatttcatgcagatgctgctccggtacattaatctgcggttcgacgtgaagggacagaagcagcgactgccaccgaaaagcgatgcgcgaaaggctttctttactcggctacgctacttgaagtcggttttcctttttgatgtggtgcccgagttggagttcctggatgacttgacaccattggagagcgaggttcttgaagagatttggtcattggatctcccattccttcctaacgatccccttgcctacgccattgttgctgatccgatgtcattttttcccgcgtactgcaaactctctgggctgtatgaacaatatggcttccaacggttcagtgcgatacctctgcgccgctcgctcattcaaagtcacgtgcgaatcgacaccatcatcctgtaccagcatatcctttgcatcacgcggcgagacgcagaaactgtcgaaaaggatgatctgtggatgcgcgtctgcaatctatgtaccaaggcttttcggtctcgctgtggtatgcattttgaaggctcaatcaccacggatggagcctcggtgtctgtatacctaaagcacccagaagcagacaagtatggaaagcgcggagcgagaaagtcagcaaacacggtggctgcagaggttaaagcgctttatgtggagaacaacttacctgcttgtcgagcagcagagaatgtcgtcgttatcgacccaaacaagcgcgacattctctactgccaagacagcaatggtacgacatttcgctacaccgccaaccagcgagccgtggagactggaagccggcggtttgcaaagagacgagaagcaatgaaggaagaagctggagttgatctcatagaatcacgaataccatcccacaaaacaatgaacctcatggacttcactcgctaccttctcgttcgccgcgctgattgggatcgtcgcaaggaattctattcgcatcctgctcatactcgatggaaatggcactccttcataaaccgtcagaagagcgaatcagacctcataagtaacatgcgcaacaagtacggtgaaaactttactgttgtgatgggtgattggagcgacgctggtcgaactgcgagatttcagacctcatcaaagacaaaaggctggcgcaccctctttaagcgcaaccgcattgattgtttccttctcgacgagtacaagacctcatctgtttgccctcgctgttcctcatctgagtttgtggagaaaaaattcaaaacacgacctcattcaagaccttggcgccgtcgtgaaggcaagattgaaaaagtccacggactgctgggttgtaccaaccctaactgtttgcagcaagcctggacatcgggaatgcgctactggaatcgagatatgctgtcaacctgcaacatgctattgattgtgagatcaatgttggatggacacggtagaccagaagtgttcagcaggagtgttccagccgtagcgtagaacgtagattggttagattaggttttccgagccggttgtcgcgcggttcaatccctggtgcgggtgctagtgccaatacccaccggctccgcactatctataggttatgaaatcaaattacaaataaatacatcaatgagacgagtgccctggtgcaagatctaccatctgcactactcttctcaataatcttgccattaattatcttagcagaccaactattccgtttgccttctttgggccacaaccgcggttgcctgaggcatcatatcgggaaaccatttcggccatacatatccatacatgacaacccaaaaagccaagcctgcaattgttcctgcgcttaagtcgactttgttcccactgtacttttagctcgtacaaaatacaatatacttttcatttctccgtaaacaacatgttttcccatgtaatatccttttctatttttcgttccgttaccaactttacacatactttatatagctattcacttctatacactaaaaaactaagacaattttaattttgctgcctgccatatttcaatttgttataaattcctataatttatcctattagtagctaaaaaaagatgaatgtgaatcgaatcctaagagaattcccctcgaagatcgatctggcggcccggccggccgcggccgcactcgagatatctagacccagctttcttgtacaaagtggtgatagcttgtcgagaagtactcgagggggggcccggtacccaattcgccctatagtgagtcgtattacgcgcgctcactggccgtcgttttacaacgtcgtgactgggaaaaccctggcgttacccaacttaatcgccttgcagcacatccccctttcgccagctggcgtaatagcgaagaggcccgcaccgatcgcccttcccaacagttgcgcagcctgaatggcgaatggacgcgccctgtagcggcgcattaagcgcggcgggtgtggtggttacgcgcagcgtgaccgctacacttgccagcgccctagcgcccgctcctttcgctttcttcccttcctttctcgccacgttcgccggctttccccgtcaagctctaaatcgggggctccctttagggttccgatttagtgctttacggcacctcgaccccaaaaaacttgattagggtgatggttcacgtagtgggccatcgccctgatagacggtttttcgccctttgacgttggagtccacgttctttaatagtggactcttgttccaaactggaacaacactcaaccctatctcggtctattcttttgatttataagggattttgccgatttcggcctattggttaaaaaatgagctgatttaacaaaaatttaacgcgaattttaacaaaatattaacgcttacaatttcctgatgcggtattttctccttacgcatctgtgcggtatttcacaccgcatagggtaataactgatataattaaattgaagctctaatttgtgagtttagtatacatgcatttacttataatacagttttttagttttgctggccgcatcttctcaaatatgcttcccagcctgcttttctgtaacgttcaccctctaccttagcatcccttccctttgcaaatagtcctcttccaacaataataatgtcagatcctgtagagaccacatcatccacggttctatactgttgacccaatgcgtctcccttgtcatctaaacccacaccgggtgtcataatcaaccaatcgtaaccttcatctcttccacccatgtctctttgagcaataaagccgataacaaaatctttgtcgctcttcgcaatgtcaacagtacccttagtatattctccagtagatagggagcccttgcatgacaattctgctaacatcaaaaggcctctaggttcctttgttacttcttctgccgcctgcttcaaaccgctaacaatacctgggcccaccacaccgtgtgcattcgtaatgtctgcccattctgctattctgtatacacccgcagagtactgcaatttgactgtattaccaatgtcagcaaattttctgtcttcgaagagtaaaaaattgtacttggcggataatgcctttagcggcttaactgtgccctccatggaaaaatcagtcaagatatccacatgtgtttttagtaaacaaattttgggacctaatgcttcaactaactccagtaattccttggtggtacgaacatccaatgaagcacacaagtttgtttgcttttcgtgcatgatattaaatagcttggcagcaacaggactaggatgagtagcagcacgttccttatatgtagctttcgacatgatttatcttcgtttcctgcaggtttttgttctgtgcagttgggttaagaatactgggcaatttcatgtttcttcaacactacatatgcgtatatataccaatctaagtctgtgctccttccttcgttcttccttctgttcggagattaccgaatcaaaaaaatttcaaggaaaccgaaatcaaaaaaaagaataaaaaaaaaatgatgaattgaaaaggtggtatggtgcactctcagtacaatctgctctgatgccgcatagttaagccagccccgacacccgccaacacccgctgacgcgccctgacgggcttgtctgctcccggcatccgcttacagacaagctgtgaccgtctccgggagctgcatgtgtcagaggttttcaccgtcatcaccgaaacgcgcga

SEQ ID NO: 3908 - RNA, 10140 nt, Saccharomyces cerevisiae
  source 1..10140: mol_type = other RNA
gacgaaagggcctcgtgatacgcctatttttataggttaatgtcatgataataatggtttcttagtatgatccaatatcaaaggaaatgatagcattgaaggatgagactaatccaattgaggagtggcagcatatagaacagctaaagggtagtgctgaaggaagcatacgataccccgcatggaatgggataatatcacaggaggtactagactacctttcatcctacataaatagacgcatataagtacgcatttaagcataaacacgcactatgccgttcttctcatgtatatatatatacaggcaacacgcagatataggtgcgacgtgaacagtgagctgtatgtgcgcagctcgcgttgcattttcggaagcgctcgttttcggaaacgctttgaagttcctattccgaagttcctattctctagaaagtataggaacttcagagcgcttttgaaaaccaaaagcgctctgaagacgcactttcaaaaaaccaaaaacgcaccggactgtaacgagctactaaaatattgcgaataccgcttccacaaacattgctcaaaagtatctctttgctatatatctctgtgctatatccctatataacctacccatccacctttcgctccttgaacttgcatctaaactcgacctctacattttttatgtttatctctagtattactctttagacaaaaaaattgtagtaagaactattcatagagtgaatcgaaaacaatacgaaaatgtaaacatttcctatacgtagtatatagagacaaaatagaagaaaccgttcataattttctgaccaatgaagaatcatcaacgctatcactttctgttcacaaagtatgcgcaatccacatcggtatagaatataatcggggatgcctttatcttgaaaaaatgcacccgcagcttcgctagtaatcagtaaacgcgggaagtggagtcaggctttttttatggaagagaaaatagacaccaaagtagccttcttctaaccttaacggacctacagtgcaaaaagttatcaagagactgcattatagagcgcacaaaggagaaaaaaagtaatctaagatgctttgttagaaaaatagcgctctcgggatgcatttttgtagaacaaaaaagaagtatagattctttgttggtaaaatagcgctctcgcgttgcatttctgttctgtaaaaatgcagctcagattctttgtttgaaaaattagcgctctcgcgttgcatttttgttttacaaaaatgaagcacagattcttcgttggtaaaatagcgctttcgcgttgcatttctgttctgtaaaaatgcagctcagattctttgtttgaaaaattagcgctctcgcgttgcatttttgttctacaaaatgaagcacagatgcttcgttcaggtggcacttttcggggaaatgtgcgcggaacccctatttgtttatttttctaaatacattcaaatatgtatccgctcatgagacaataaccctgataaatgcttcaataatattgaaaaaggaagagtatgagtattcaacatttccgtgtcgcccttattcccttttttgcggcattttgccttcctgtttttgctcacccagaaacgctggtgaaagtaaaagatgctgaagatcagttgggtgcacgagtgggttacatcgaactggatctcaacagcggtaagatccttgagagttttcgccccgaagaacgttttccaatgatgagcacttttaaagttctgctatgtggcgcggtattatcccgtattgacgccgggcaagagcaactcggtcgccgcatacactattctcagaatgacttggttgagtactcaccagtcacagaaaagcatcttacggatggcatgacagtaagagaattatgcagtgctgccataaccatgagtgataacactgcggccaacttacttctgacaacgatcggaggaccgaaggagctaaccgcttttttgcacaacatgggggatcatgtaactcgccttgatcgttgggaaccggagctgaatgaagccataccaaacgacgagcgtgacaccacgatgcctgtagcaatggcaacaacgttgcgcaaactattaactggcgaactacttactctagcttcccggcaacaattaatagactggatggaggcggataaagttgcaggaccacttctgcgctcggcccttccggctggctggtttattgctgataaatctggagccggtgagcgtgggtctcgcggtatcattgcagcactggggccagatggtaagccctcccgtatcgtagttatctacacgacggggagtcaggcaactatggatgaacgaaatagacagatcgctgagataggtgcctcactgattaagcattggtaactgtcagaccaagtttactcatatatactttagattgatttaaaacttcatttttaatttaaaaggatctaggtgaagatcctttttgataatctcatgaccaaaatcccttaacgtgagttttcgttccactgagcgtcagaccccgtagaaaagatcaaaggatcttcttgagatcctttttttctgcgcgtaatctgctgcttgcaaacaaaaaaaccaccgctaccagcggtggtttgtttgccggatcaagagctaccaactctttttccgaaggtaactggcttcagcagagcgcagataccaaatactgttcttctagtgtagccgtagttaggccaccacttcaagaactctgtagcaccgcctacatacctcgctctgctaatcctgttaccagtggctgctgccagtggcgataagtcgtgtcttaccgggttggactcaagacgatagttaccggataaggcgcagcggtcgggctgaacggggggttcgtgcacacagcccagcttggagcgaacgacctacaccgaactgagatacctacagcgtgagctatgagaaagcgccacgcttcccgaagggagaaaggcggacaggtatccggtaagcggcagggtcggaacaggagagcgcacgagggagcttccagggggaaacgcctggtatctttatagtcctgtcgggtttcgccacctctgacttgagcgtcgatttttgtgatgctcgtcaggggggcggagcctatggaaaaacgccagcaacgcggcctttttacggttcctggccttttgctggccttttgctcacatgttctttcctgcgttatcccctgattctgtggataaccgtattaccgcctttgagtgagctgataccgctcgccgcagccgaacgaccgagcgcagcgagtcagtgagcgaggaagcggaagagcgcccaatacgcaaaccgcctctccccgcgcgttggccgattcattaatgcagctggcacgacaggtttcccgactggaaagcgggcagtgagcgcaacgcaattaatgtgagttagctcactcattaggcaccccaggctttacactttatgcttccggctcgtatgttgtgtggaattgtgagcggataacaatttcacacaggaaacagctatgaccatgattacgccaagcgcgcaattaaccctcactaaagggaacaaaagctggagctccaccgcggtggcggcccccgtcccaccatcgggcgcggatcatcacaagtttgtacaaaaaagcaggctctttggccatataggccaccaggtcctgcaggcgcgctcttcaggaggcgcgccaactgccctcttaattaacgaagaagatcggaccggggccgcggatctttgcaaagatccaaaaaaagcatgcgtacggattagaagccgccgagcgggtgacagccctccgaaggaagactctcctccgtgcgtcctcgtcttcaccggtcgcgttcctgaaacgcagatgtgcctcgcgccgcactgctccgaacaataaagattctacaatactagcttttatggttatgaagaggaaaattggcagtaacctggccccacaaacctcaaatgaacgaatcaaattaacaaccagatatctcgactgaaaaaaaaggtttaaaccagttccctgaaattattcccctacttgactaataagtatataaagacggtaggtattgattgtaattctgtaaatctatttcttaaacttcttgaattctacttttatagttagtcttttttttagttttaaaacaccaagaacttagtttcgaataaacacacataaataaaccatgaaatcttctcaccatcaccatcaccatcaccatcaccatggttcttctatgaaaatcgaagaaggtaaactggtaatctggattaacggcgataaaggctataacggtctcgctgaagtcggtaagaaattcgagaaagataccggaattaaagtcaccgttgagcatccggataaactggaagagaaattcccacaggttgcggcaactggcgatggccctgacattatcttctgggcacacgaccgctttggtggctacgctcaatctggcctgttggctgaaatcaccccggacaaagcgttccaggacaagctgtatccgtttacctgggatgccgtacgttacaacggcaagctgattgcttacccgatcgctgttgaagcgttatcgctgatttataacaaagatctgctgccgaacccgccaaaaacctgggaagagatcccggcgctggataaagaactgaaagcgaaaggtaagagcgcgctgatgttcaacctgcaagaaccgtacttcacctggccgctgattgctgctgacgggggttatgcgttcaagtatgaaaacggcaagtacgacattaaagacgtgggcgtggataacgctggcgcgaaagcgggtctgaccttcctggttgacctgattaaaaacaaacacatgaatgcagacaccgattactccatcgcagaagctgcctttaataaaggcgaaacagcgatgaccatcaacggcccgtgggcatggtccaacatcgacaccagcaaagtgaattatggtgtaacggtactgccgaccttcaagggtcaaccatccaaaccgttcgttggcgtgctgagcgcaggtattaacgccgccagtccgaacaaagagctggcaaaagagttcctcgaaaactatctgctgactgatgaaggtctggaagcggttaataaagacaaaccgctgggtgccgtagcgctgaagtcttacgaggaagagttggcgaaagatccacgtattgccgccactatggaaaacgcccagaaaggtgaaatcatgccgaacatcccgcagatgtccgctttctggtatgccgtgcgtactgcggtgatcaacgccgccagcggtcgtcagactgtcgatgaagccctgaaagacgcgcagactaattcgagctcgaacaacaacaacaataacaataacaacaacctcgggatcgaggaaaacctgtacttccaatccaatgcaccaccaaaaaagaagcaaaagcttgaaaaactcgacaaacccaccttacatacctgcaacaagacttcctttgcaaaagctttcttgcctaatgagacctaccggcagcgtcttctagattacatcgccatcatccatcaactcgctgaccatgcttcccacgctctcaaattctacatcctatatgcaccaacctttcccacggtaaatgaagatacaatcgaagcgattctctatcttctcaacaagggggaggcttggcatccaagaaaggaagcaaagaaggcactacgcggatgcttgttgccatacattcgtcggtactgccaaatcgtcggcttcattcacccaaatctacgaggcgagcagcagtcaatcaattacctgacagcgagtatgatgacaaacctgaaagtcaacattcaagagcatttcatgcagatgctgctccggtatatcaatctgcggctcaacgtgaagggacgggggcgactgccactgaaaagcgatgcgcggaaagctttctttgctcgtcttcgctacttgaagtcaatttttctttttgatgtcatgcccgagtcactggatgacttgactgctgaggagagtgagcttctagaagagatgtggtccttcattcccctttctgaccagccgctcgcatattcggttgctgttgaccctctcgctttctttcctgcttactgcaaactctctgtgctgtatgaacgacatggcttccgtcggttcagcgcaatacctcttcgtcggtctctgatgcagtcccatattcgcatcgacaccgtcatcctgtaccagcatatcctttgcatcacacgacgagaagcggaaactgtcgaaaaggtcgatttatggttgcgcgtgtgcaacctgcggaacaaggcttttcggtctcgccgcggtatgcagtttgaaggctcgatcagtacagatggaacctcggtgtctgtatacctaaagcacccagaagcagacaagtatggaaagggagcgagaaagtcagcaaagagtttagaggacgaagttaaagtgcaatacatggagaaaaacttacctgcttgtcgggcagcagaaaacattgtcgtcattgacccaaacaagcgcgatattctctactgccaagacagcaatggtacaacgttccgttacaccgcaaaccagcgagccatggagacaggcagccgtcggcagcgaaaggaacgacagcagatgaagaaggaagcgggaattgacctcatagaatcacgtatcccaagccacaagacgatgaacctcatggactttactcgctaccttcttgttcgccgcgcagattcggatcgtcgcaaggaattctactcccaccctgcccacacgcgatggaaatggcacgcattcataaaccgtcagaagagcgaatcagacctcatatccaacatgcacaacaagtttgggaactttaccattgtgatgggagattggagcgatgccggtcgaactgcgagatttcagacctcatcaaagacgaaaggctggcgcaccctctttaagcgcaacaggatcaactgcttccttctcgacgagtacaagacctcatctgtctgccctcactgtttggcctcatccgctgacttccttgaaaaaggcttcaaaacacgacctcattcaagaccttggcgccgtcgcgaaggcaagattgaaaaagtccatggattgctgggttgtaccaaccctaactgtcagcaagcctggacgatgcgctactggaacagggacacgctgagcacctgcaacatgctgatgatcgtgcaatcaatgttagatggacacggtagaccaaaagtgttcagcaggggtgttccagccgtagcgtagattagttagattaccttttccgaactggttgtcgccggttcaatccctggtgcgggtgctagtgccaatacccatcggctccgcactatattaagcttgttctacaaagcggaacgacgttcacatgcaaagagtctttgacaaagcacacaataatagttaaatacaaatacaagatttccaaattcttttctagtgtttgcatttgcgtcccatgtcacccaaacaaactcaagattttaacaaaagtggtggtaagaaggtagttactattttaaactcttgtgcaagccgcaaaatcccagtgtgaccaattggcagagcataattcggttgtggtccagaaaggatgggaggattaacacaggacatagctgccgtgcaaactgcttaagtcgactttgttcccactgtacttttagctcgtacaaaatacaatatacttttcatttctccgtaaacaacatgttttcccatgtaatatccttttctatttttcgttccgttaccaactttacacatactttatatagctattcacttctatacactaaaaaactaagacaattttaattttgctgcctgccatatttcaatttgttataaattcctataatttatcctattagtagctaaaaaaagatgaatgtgaatcgaatcctaagagaattcccctcgaagatcgatctggcggcccggccggccgcggccgcactcgagatatctagacccagctttcttgtacaaagtggtgatagcttgtcgagaagtactcgagggggggcccggtacccaattcgccctatagtgagtcgtattacgcgcgctcactggccgtcgttttacaacgtcgtgactgggaaaaccctggcgttacccaacttaatcgccttgcagcacatccccctttcgccagctggcgtaatagcgaagaggcccgcaccgatcgcccttcccaacagttgcgcagcctgaatggcgaatggacgcgccctgtagcggcgcattaagcgcggcgggtgtggtggttacgcgcagcgtgaccgctacacttgccagcgccctagcgcccgctcctttcgctttcttcccttcctttctcgccacgttcgccggctttccccgtcaagctctaaatcgggggctccctttagggttccgatttagtgctttacggcacctcgaccccaaaaaacttgattagggtgatggttcacgtagtgggccatcgccctgatagacggtttttcgccctttgacgttggagtccacgttctttaatagtggactcttgttccaaactggaacaacactcaaccctatctcggtctattcttttgatttataagggattttgccgatttcggcctattggttaaaaaatgagctgatttaacaaaaatttaacgcgaattttaacaaaatattaacgcttacaatttcctgatgcggtattttctccttacgcatctgtgcggtatttcacaccgcatagggtaataactgatataattaaattgaagctctaatttgtgagtttagtatacatgcatttacttataatacagttttttagttttgctggccgcatcttctcaaatatgcttcccagcctgcttttctgtaacgttcaccctctaccttagcatcccttccctttgcaaatagtcctcttccaacaataataatgtcagatcctgtagagaccacatcatccacggttctatactgttgacccaatgcgtctcccttgtcatctaaacccacaccgggtgtcataatcaaccaatcgtaaccttcatctcttccacccatgtctctttgagcaataaagccgataacaaaatctttgtcgctcttcgcaatgtcaacagtacccttagtatattctccagtagatagggagcccttgcatgacaattctgctaacatcaaaaggcctctaggttcctttgttacttcttctgccgcctgcttcaaaccgctaacaatacctgggcccaccacaccgtgtgcattcgtaatgtctgcccattctgctattctgtatacacccgcagagtactgcaatttgactgtattaccaatgtcagcaaattttctgtcttcgaagagtaaaaaattgtacttggcggataatgcctttagcggcttaactgtgccctccatggaaaaatcagtcaagatatccacatgtgtttttagtaaacaaattttgggacctaatgcttcaactaactccagtaattccttggtggtacgaacatccaatgaagcacacaagtttgtttgcttttcgtgcatgatattaaatagcttggcagcaacaggactaggatgagtagcagcacgttccttatatgtagctttcgacatgatttatcttcgtttcctgcaggtttttgttctgtgcagttgggttaagaatactgggcaatttcatgtttcttcaacactacatatgcgtatatataccaatctaagtctgtgctccttccttcgttcttccttctgttcggagattaccgaatcaaaaaaatttcaaggaaaccgaaatcaaaaaaaagaataaaaaaaaaatgatgaattgaaaaggtggtatggtgcactctcagtacaatctgctctgatgccgcatagttaagccagccccgacacccgccaacacccgctgacgcgccctgacgggcttgtctgctcccggcatccgcttacagacaagctgtgaccgtctccgggagctgcatgtgtcagaggttttcaccgtcatcaccgaaacgcgcga

SEQ ID NO: 3909 - RNA, 9975 nt, Saccharomyces cerevisiae
  source 1..9975: mol_type = other RNA
gacgaaagggcctcgtgatacgcctatttttataggttaatgtcatgataataatggtttcttagtatgatccaatatcaaaggaaatgatagcattgaaggatgagactaatccaattgaggagtggcagcatatagaacagctaaagggtagtgctgaaggaagcatacgataccccgcatggaatgggataatatcacaggaggtactagactacctttcatcctacataaatagacgcatataagtacgcatttaagcataaacacgcactatgccgttcttctcatgtatatatatatacaggcaacacgcagatataggtgcgacgtgaacagtgagctgtatgtgcgcagctcgcgttgcattttcggaagcgctcgttttcggaaacgctttgaagttcctattccgaagttcctattctctagaaagtataggaacttcagagcgcttttgaaaaccaaaagcgctctgaagacgcactttcaaaaaaccaaaaacgcaccggactgtaacgagctactaaaatattgcgaataccgcttccacaaacattgctcaaaagtatctctttgctatatatctctgtgctatatccctatataacctacccatccacctttcgctccttgaacttgcatctaaactcgacctctacattttttatgtttatctctagtattactctttagacaaaaaaattgtagtaagaactattcatagagtgaatcgaaaacaatacgaaaatgtaaacatttcctatacgtagtatatagagacaaaatagaagaaaccgttcataattttctgaccaatgaagaatcatcaacgctatcactttctgttcacaaagtatgcgcaatccacatcggtatagaatataatcggggatgcctttatcttgaaaaaatgcacccgcagcttcgctagtaatcagtaaacgcgggaagtggagtcaggctttttttatggaagagaaaatagacaccaaagtagccttcttctaaccttaacggacctacagtgcaaaaagttatcaagagactgcattatagagcgcacaaaggagaaaaaaagtaatctaagatgctttgttagaaaaatagcgctctcgggatgcatttttgtagaacaaaaaagaagtatagattctttgttggtaaaatagcgctctcgcgttgcatttctgttctgtaaaaatgcagctcagattctttgtttgaaaaattagcgctctcgcgttgcatttttgttttacaaaaatgaagcacagattcttcgttggtaaaatagcgctttcgcgttgcatttctgttctgtaaaaatgcagctcagattctttgtttgaaaaattagcgctctcgcgttgcatttttgttctacaaaatgaagcacagatgcttcgttcaggtggcacttttcggggaaatgtgcgcggaacccctatttgtttatttttctaaatacattcaaatatgtatccgctcatgagacaataaccctgataaatgcttcaataatattgaaaaaggaagagtatgagtattcaacatttccgtgtcgcccttattcccttttttgcggcattttgccttcctgtttttgctcacccagaaacgctggtgaaagtaaaagatgctgaagatcagttgggtgcacgagtgggttacatcgaactggatctcaacagcggtaagatccttgagagttttcgccccgaagaacgttttccaatgatgagcacttttaaagttctgctatgtggcgcggtattatcccgtattgacgccgggcaagagcaactcggtcgccgcatacactattctcagaatgacttggttgagtactcaccagtcacagaaaagcatcttacggatggcatgacagtaagagaattatgcagtgctgccataaccatgagtgataacactgcggccaacttacttctgacaacgatcggaggaccgaaggagctaaccgcttttttgcacaacatgggggatcatgtaactcgccttgatcgttgggaaccggagctgaatgaagccataccaaacgacgagcgtgacaccacgatgcctgtagcaatggcaacaacgttgcgcaaactattaactggcgaactacttactctagcttcccggcaacaattaatagactggatggaggcggataaagttgcaggaccacttctgcgctcggcccttccggctggctggtttattgctgataaatctggagccggtgagcgtgggtctcgcggtatcattgcagcactggggccagatggtaagccctcccgtatcgtagttatctacacgacggggagtcaggcaactatggatgaacgaaatagacagatcgctgagataggtgcctcactgattaagcattggtaactgtcagaccaagtttactcatatatactttagattgatttaaaacttcatttttaatttaaaaggatctaggtgaagatcctttttgataatctcatgaccaaaatcccttaacgtgagttttcgttccactgagcgtcagaccccgtagaaaagatcaaaggatcttcttgagatcctttttttctgcgcgtaatctgctgcttgcaaacaaaaaaaccaccgctaccagcggtggtttgtttgccggatcaagagctaccaactctttttccgaaggtaactggcttcagcagagcgcagataccaaatactgttcttctagtgtagccgtagttaggccaccacttcaagaactctgtagcaccgcctacatacctcgctctgctaatcctgttaccagtggctgctgccagtggcgataagtcgtgtcttaccgggttggactcaagacgatagttaccggataaggcgcagcggtcgggctgaacggggggttcgtgcacacagcccagcttggagcgaacgacctacaccgaactgagatacctacagcgtgagctatgagaaagcgccacgcttcccgaagggagaaaggcggacaggtatccggtaagcggcagggtcggaacaggagagcgcacgagggagcttccagggggaaacgcctggtatctttatagtcctgtcgggtttcgccacctctgacttgagcgtcgatttttgtgatgctcgtcaggggggcggagcctatggaaaaacgccagcaacgcggcctttttacggttcctggccttttgctggccttttgctcacatgttctttcctgcgttatcccctgattctgtggataaccgtattaccgcctttgagtgagctgataccgctcgccgcagccgaacgaccgagcgcagcgagtcagtgagcgaggaagcggaagagcgcccaatacgcaaaccgcctctccccgcgcgttggccgattcattaatgcagctggcacgacaggtttcccgactggaaagcgggcagtgagcgcaacgcaattaatgtgagttagctcactcattaggcaccccaggctttacactttatgcttccggctcgtatgttgtgtggaattgtgagcggataacaatttcacacaggaaacagctatgaccatgattacgccaagcgcgcaattaaccctcactaaagggaacaaaagctggagctccaccgcggtggcggcccccgtcccaccatcgggcgcggatcatcacaagtttgtacaaaaaagcaggctctttggccatataggccaccaggtcctgcaggcgcgctcttcaggaggcgcgccaactgccctcttaattaacgaagaagatcggaccggggccgcggatctttgcaaagatccaaaaaaagcatgcgtacggattagaagccgccgagcgggtgacagccctccgaaggaagactctcctccgtgcgtcctcgtcttcaccggtcgcgttcctgaaacgcagatgtgcctcgcgccgcactgctccgaacaataaagattctacaatactagcttttatggttatgaagaggaaaattggcagtaacctggccccacaaacctcaaatgaacgaatcaaattaacaaccagatatctcgactgaaaaaaaaggtttaaaccagttccctgaaattattcccctacttgactaataagtatataaagacggtaggtattgattgtaattctgtaaatctatttcttaaacttcttgaattctacttttatagttagtcttttttttagttttaaaacaccaagaacttagtttcgaataaacacacataaataaaccatgaaatcttctcaccatcaccatcaccatcaccatcaccatggttcttctatgaaaatcgaagaaggtaaactggtaatctggattaacggcgataaaggctataacggtctcgctgaagtcggtaagaaattcgagaaagataccggaattaaagtcaccgttgagcatccggataaactggaagagaaattcccacaggttgcggcaactggcgatggccctgacattatcttctgggcacacgaccgctttggtggctacgctcaatctggcctgttggctgaaatcaccccggacaaagcgttccaggacaagctgtatccgtttacctgggatgccgtacgttacaacggcaagctgattgcttacccgatcgctgttgaagcgttatcgctgatttataacaaagatctgctgccgaacccgccaaaaacctgggaagagatcccggcgctggataaagaactgaaagcgaaaggtaagagcgcgctgatgttcaacctgcaagaaccgtacttcacctggccgctgattgctgctgacgggggttatgcgttcaagtatgaaaacggcaagtacgacattaaagacgtgggcgtggataacgctggcgcgaaagcgggtctgaccttcctggttgacctgattaaaaacaaacacatgaatgcagacaccgattactccatcgcagaagctgcctttaataaaggcgaaacagcgatgaccatcaacggcccgtgggcatggtccaacatcgacaccagcaaagtgaattatggtgtaacggtactgccgaccttcaagggtcaaccatccaaaccgttcgttggcgtgctgagcgcaggtattaacgccgccagtccgaacaaagagctggcaaaagagttcctcgaaaactatctgctgactgatgaaggtctggaagcggttaataaagacaaaccgctgggtgccgtagcgctgaagtcttacgaggaagagttggcgaaagatccacgtattgccgccactatggaaaacgcccagaaaggtgaaatcatgccgaacatcccgcagatgtccgctttctggtatgccgtgcgtactgcggtgatcaacgccgccagcggtcgtcagactgtcgatgaagccctgaaagacgcgcagactaattcgagctcgaacaacaacaacaataacaataacaacaacctcgggatcgaggaaaacctgtacttccaatccaatgcaccaccaaaaaagaagcaaaagcttgaaaaccctacttgcttacatacctgcaacaagacttcctttgcaaaagctttcctgccaaacgacatctaccgccaacggcttttagattacatcgccatcatccatcaacttgctgaccatgcttcccacgctctcaaattctacatcctatctgcaccatcctttcccacgttagatcaagatacaatcgaagcgattctctatcttctcaacaaaggagaggcttggcaaccaaaagctgatgcaaagaaggcgctacgtggatgcttggtgccatatattcgtcggtactgccacatcgtcagcttcgttcatccaaatctacaaaaagagcagcagtcaatcaattacctgacagcgagtatgatgacgaacctgaaagtcaacgttcaagagcatttcatgcagatgctccttcggtatatcaatctgcggctcgatgtgaagggacagaagcagcgactgccactgaaaagcgatgcacggaaagctttctttactcgactacgctacttaaagtcagtttttctttttgatatcgtgcccgagtcgctggatgacttgaccgctgaagagagtgagcttctagaagagatgtggtccttcattcccctttccgaccagccgctcgcatattcggttgctgttgaccctctcgctttctttcctgcttactgcaaactctctgtgctgtatgaacgacatggcttccgtcggttcagcgcaatacctcttcgtcggtctctgattcagtcccatattcgcatcgacacggtcatcctgtaccagcatatcctttgcatcacgcgacgggaagcggaaactgttgaaaaggtcgacttatggttgcgcatctgtaatctgcggaacaaggcttttagatctcgtcgtggaatgtgttttgaaggctcgatcacgacagacggtacctcggtgtcagtttacttgaaacatcctgaagctgacaagtatggaaagcgcagcggcggagggaaaaagtcagcaaacacaatggaggcagaggttaaagcgcaatatgtggagaaaaacttacctgcttgtcgagtagcagagaatgttgttgttatcgacccaaacaagcgcgacattctctactgccaagacagcattggtacaacatttcgctacaccgccaaccagcgagccatggagacaggtagccgtcgacagcaaaaggaacgacagcagatgaagaagggggaaattgacctcatagaatcacgtatccctagccacaaaacaatgaacctcatggattttactcgctaccttctcgttcgccgcgcggattcggatcgtcgcaaggaattctactcacatcctgcccacacgcggtggaagtggcactccttcatcaatcggcagcgaagcgaatcagacctcataagcgccatgcgcaacaaatacggtgaaaactttaccgttgtgatgggtgattggagcgacgccggtcgaactgccagatttcagacctcatcaaagacaaaaggttggcgcaccctctttaagcggaacaggatcaactgcttccttctcgacgagtacaagacctcatctgtctgccctcactgttcatccgatgacttccttgaaaaaggcttcaaaacacgacctcattcaagaccttggcgacgacgagaaggcaatgttgaaaaagtccatggattgctgggttgtaccaaccctaactgtttgcagcaagactggacatcgggaatgcgctactggaacagggacacactgagcacctgcaatatgctgatgatcgtgcaatcaattatggatggacacggtagaccagaggtgttcagcaggagtgttccagccgtagcgtagattggttagattagcttttccgaaccggttatcgccggttcaatccctggtgcgggtgctagtgccaatacccatcggctcccgcactagccaaggtggcacgacggttgtcctttatccgcttaagtcgactttgttccctggtgcgggtgctagtgccaatacccatcggctcccgcactagccaaggtggcacgacggttgtcctttatccgcttaagtcgactttgttcccactgtacttttagctcgtacaaaatacaatatacttttcatttctccgtaaacaacatgttttcccatgtaatatccttttctatttttcgttccgttaccaactttacacatactttatatagctattcacttctatacactaaaaaactaagacaattttaattttgctgcctgccatatttcaatttgttataaattcctataatttatcctattagtagctaaaaaaagatgaatgtgaatcgaatcctaagagaattcccctcgaagatcgatctggcggcccggccggccgcggccgcactcgagatatctagacccagctttcttgtacaaagtggtgatagcttgtcgagaagtactcgagggggggcccggtacccaattcgccctatagtgagtcgtattacgcgcgctcactggccgtcgttttacaacgtcgtgactgggaaaaccctggcgttacccaacttaatcgccttgcagcacatccccctttcgccagctggcgtaatagcgaagaggcccgcaccgatcgcccttcccaacagttgcgcagcctgaatggcgaatggacgcgccctgtagcggcgcattaagcgcggcgggtgtggtggttacgcgcagcgtgaccgctacacttgccagcgccctagcgcccgctcctttcgctttcttcccttcctttctcgccacgttcgccggctttccccgtcaagctctaaatcgggggctccctttagggttccgatttagtgctttacggcacctcgaccccaaaaaacttgattagggtgatggttcacgtagtgggccatcgccctgatagacggtttttcgccctttgacgttggagtccacgttctttaatagtggactcttgttccaaactggaacaacactcaaccctatctcggtctattcttttgatttataagggattttgccgatttcggcctattggttaaaaaatgagctgatttaacaaaaatttaacgcgaattttaacaaaatattaacgcttacaatttcctgatgcggtattttctccttacgcatctgtgcggtatttcacaccgcatagggtaataactgatataattaaattgaagctctaatttgtgagtttagtatacatgcatttacttataatacagttttttagttttgctggccgcatcttctcaaatatgcttcccagcctgcttttctgtaacgttcaccctctaccttagcatcccttccctttgcaaatagtcctcttccaacaataataatgtcagatcctgtagagaccacatcatccacggttctatactgttgacccaatgcgtctcccttgtcatctaaacccacaccgggtgtcataatcaaccaatcgtaaccttcatctcttccacccatgtctctttgagcaataaagccgataacaaaatctttgtcgctcttcgcaatgtcaacagtacccttagtatattctccagtagatagggagcccttgcatgacaattctgctaacatcaaaaggcctctaggttcctttgttacttcttctgccgcctgcttcaaaccgctaacaatacctgggcccaccacaccgtgtgcattcgtaatgtctgcccattctgctattctgtatacacccgcagagtactgcaatttgactgtattaccaatgtcagcaaattttctgtcttcgaagagtaaaaaattgtacttggcggataatgcctttagcggcttaactgtgccctccatggaaaaatcagtcaagatatccacatgtgtttttagtaaacaaattttgggacctaatgcttcaactaactccagtaattccttggtggtacgaacatccaatgaagcacacaagtttgtttgcttttcgtgcatgatattaaatagcttggcagcaacaggactaggatgagtagcagcacgttccttatatgtagctttcgacatgatttatcttcgtttcctgcaggtttttgttctgtgcagttgggttaagaatactgggcaatttcatgtttcttcaacactacatatgcgtatatataccaatctaagtctgtgctccttccttcgttcttccttctgttcggagattaccgaatcaaaaaaatttcaaggaaaccgaaatcaaaaaaaagaataaaaaaaaaatgatgaattgaaaaggtggtatggtgcactctcagtacaatctgctctgatgccgcatagttaagccagccccgacacccgccaacacccgctgacgcgccctgacgggcttgtctgctcccggcatccgcttacagacaagctgtgaccgtctccgggagctgcatgtgtcagaggttttcaccgtcatcaccgaaacgcgcga

SEQ ID NO: 3910 - RNA, 9965 nt, Saccharomyces cerevisiae
  source 1..9965: mol_type = other RNA
gacgaaagggcctcgtgatacgcctatttttataggttaatgtcatgataataatggtttcttagtatgatccaatatcaaaggaaatgatagcattgaaggatgagactaatccaattgaggagtggcagcatatagaacagctaaagggtagtgctgaaggaagcatacgataccccgcatggaatgggataatatcacaggaggtactagactacctttcatcctacataaatagacgcatataagtacgcatttaagcataaacacgcactatgccgttcttctcatgtatatatatatacaggcaacacgcagatataggtgcgacgtgaacagtgagctgtatgtgcgcagctcgcgttgcattttcggaagcgctcgttttcggaaacgctttgaagttcctattccgaagttcctattctctagaaagtataggaacttcagagcgcttttgaaaaccaaaagcgctctgaagacgcactttcaaaaaaccaaaaacgcaccggactgtaacgagctactaaaatattgcgaataccgcttccacaaacattgctcaaaagtatctctttgctatatatctctgtgctatatccctatataacctacccatccacctttcgctccttgaacttgcatctaaactcgacctctacattttttatgtttatctctagtattactctttagacaaaaaaattgtagtaagaactattcatagagtgaatcgaaaacaatacgaaaatgtaaacatttcctatacgtagtatatagagacaaaatagaagaaaccgttcataattttctgaccaatgaagaatcatcaacgctatcactttctgttcacaaagtatgcgcaatccacatcggtatagaatataatcggggatgcctttatcttgaaaaaatgcacccgcagcttcgctagtaatcagtaaacgcgggaagtggagtcaggctttttttatggaagagaaaatagacaccaaagtagccttcttctaaccttaacggacctacagtgcaaaaagttatcaagagactgcattatagagcgcacaaaggagaaaaaaagtaatctaagatgctttgttagaaaaatagcgctctcgggatgcatttttgtagaacaaaaaagaagtatagattctttgttggtaaaatagcgctctcgcgttgcatttctgttctgtaaaaatgcagctcagattctttgtttgaaaaattagcgctctcgcgttgcatttttgttttacaaaaatgaagcacagattcttcgttggtaaaatagcgctttcgcgttgcatttctgttctgtaaaaatgcagctcagattctttgtttgaaaaattagcgctctcgcgttgcatttttgttctacaaaatgaagcacagatgcttcgttcaggtggcacttttcggggaaatgtgcgcggaacccctatttgtttatttttctaaatacattcaaatatgtatccgctcatgagacaataaccctgataaatgcttcaataatattgaaaaaggaagagtatgagtattcaacatttccgtgtcgcccttattcccttttttgcggcattttgccttcctgtttttgctcacccagaaacgctggtgaaagtaaaagatgctgaagatcagttgggtgcacgagtgggttacatcgaactggatctcaacagcggtaagatccttgagagttttcgccccgaagaacgttttccaatgatgagcacttttaaagttctgctatgtggcgcggtattatcccgtattgacgccgggcaagagcaactcggtcgccgcatacactattctcagaatgacttggttgagtactcaccagtcacagaaaagcatcttacggatggcatgacagtaagagaattatgcagtgctgccataaccatgagtgataacactgcggccaacttacttctgacaacgatcggaggaccgaaggagctaaccgcttttttgcacaacatgggggatcatgtaactcgccttgatcgttgggaaccggagctgaatgaagccataccaaacgacgagcgtgacaccacgatgcctgtagcaatggcaacaacgttgcgcaaactattaactggcgaactacttactctagcttcccggcaacaattaatagactggatggaggcggataaagttgcaggaccacttctgcgctcggcccttccggctggctggtttattgctgataaatctggagccggtgagcgtgggtctcgcggtatcattgcagcactggggccagatggtaagccctcccgtatcgtagttatctacacgacggggagtcaggcaactatggatgaacgaaatagacagatcgctgagataggtgcctcactgattaagcattggtaactgtcagaccaagtttactcatatatactttagattgatttaaaacttcatttttaatttaaaaggatctaggtgaagatcctttttgataatctcatgaccaaaatcccttaacgtgagttttcgttccactgagcgtcagaccccgtagaaaagatcaaaggatcttcttgagatcctttttttctgcgcgtaatctgctgcttgcaaacaaaaaaaccaccgctaccagcggtggtttgtttgccggatcaagagctaccaactctttttccgaaggtaactggcttcagcagagcgcagataccaaatactgttcttctagtgtagccgtagttaggccaccacttcaagaactctgtagcaccgcctacatacctcgctctgctaatcctgttaccagtggctgctgccagtggcgataagtcgtgtcttaccgggttggactcaagacgatagttaccggataaggcgcagcggtcgggctgaacggggggttcgtgcacacagcccagcttggagcgaacgacctacaccgaactgagatacctacagcgtgagctatgagaaagcgccacgcttcccgaagggagaaaggcggacaggtatccggtaagcggcagggtcggaacaggagagcgcacgagggagcttccagggggaaacgcctggtatctttatagtcctgtcgggtttcgccacctctgacttgagcgtcgatttttgtgatgctcgtcaggggggcggagcctatggaaaaacgccagcaacgcggcctttttacggttcctggccttttgctggccttttgctcacatgttctttcctgcgttatcccctgattctgtggataaccgtattaccgcctttgagtgagctgataccgctcgccgcagccgaacgaccgagcgcagcgagtcagtgagcgaggaagcggaagagcgcccaatacgcaaaccgcctctccccgcgcgttggccgattcattaatgcagctggcacgacaggtttcccgactggaaagcgggcagtgagcgcaacgcaattaatgtgagttagctcactcattaggcaccccaggctttacactttatgcttccggctcgtatgttgtgtggaattgtgagcggataacaatttcacacaggaaacagctatgaccatgattacgccaagcgcgcaattaaccctcactaaagggaacaaaagctggagctccaccgcggtggcggcccccgtcccaccatcgggcgcggatcatcacaagtttgtacaaaaaagcaggctctttggccatataggccaccaggtcctgcaggcgcgctcttcaggaggcgcgccaactgccctcttaattaacgaagaagatcggaccggggccgcggatctttgcaaagatccaaaaaaagcatgcgtacggattagaagccgccgagcgggtgacagccctccgaaggaagactctcctccgtgcgtcctcgtcttcaccggtcgcgttcctgaaacgcagatgtgcctcgcgccgcactgctccgaacaataaagattctacaatactagcttttatggttatgaagaggaaaattggcagtaacctggccccacaaacctcaaatgaacgaatcaaattaacaaccagatatctcgactgaaaaaaaaggtttaaaccagttccctgaaattattcccctacttgactaataagtatataaagacggtaggtattgattgtaattctgtaaatctatttcttaaacttcttgaattctacttttatagttagtcttttttttagttttaaaacaccaagaacttagtttcgaataaacacacataaataaaccatgaaatcttctcaccatcaccatcaccatcaccatcaccatggttcttctatgaaaatcgaagaaggtaaactggtaatctggattaacggcgataaaggctataacggtctcgctgaagtcggtaagaaattcgagaaagataccggaattaaagtcaccgttgagcatccggataaactggaagagaaattcccacaggttgcggcaactggcgatggccctgacattatcttctgggcacacgaccgctttggtggctacgctcaatctggcctgttggctgaaatcaccccggacaaagcgttccaggacaagctgtatccgtttacctgggatgccgtacgttacaacggcaagctgattgcttacccgatcgctgttgaagcgttatcgctgatttataacaaagatctgctgccgaacccgccaaaaacctgggaagagatcccggcgctggataaagaactgaaagcgaaaggtaagagcgcgctgatgttcaacctgcaagaaccgtacttcacctggccgctgattgctgctgacgggggttatgcgttcaagtatgaaaacggcaagtacgacattaaagacgtgggcgtggataacgctggcgcgaaagcgggtctgaccttcctggttgacctgattaaaaacaaacacatgaatgcagacaccgattactccatcgcagaagctgcctttaataaaggcgaaacagcgatgaccatcaacggcccgtgggcatggtccaacatcgacaccagcaaagtgaattatggtgtaacggtactgccgaccttcaagggtcaaccatccaaaccgttcgttggcgtgctgagcgcaggtattaacgccgccagtccgaacaaagagctggcaaaagagttcctcgaaaactatctgctgactgatgaaggtctggaagcggttaataaagacaaaccgctgggtgccgtagcgctgaagtcttacgaggaagagttggcgaaagatccacgtattgccgccactatggaaaacgcccagaaaggtgaaatcatgccgaacatcccgcagatgtccgctttctggtatgccgtgcgtactgcggtgatcaacgccgccagcggtcgtcagactgtcgatgaagccctgaaagacgcgcagactaattcgagctcgaacaacaacaacaataacaataacaacaacctcgggatcgaggaaaacctgtacttccaatccaatgcaccaccaaagaagcaaaggctcgaaaaactcgacaaacccaccttagtgaccttacacacctgcaacaagacgtcctttgcaaaagctttcctgccaaacgagatctaccaccaacggcttctagattacatcgccatcattcatgaacttgctgaccacgcttcccacgctctcaaattctacatcctatctgcaccatcctttcccatggtagatcaagatacaatcgaagcgattctctatcttctcaacaagggggaggcttggcatccaagaaaggaagcaaagaaggcatggcgggattgtttgctgccatatgttcaacggtactgccaaatcgtcggctttgttcaccccaatctacgaggcgagcagcaatcagtcaattacctgacagcgagtatgatgacgaacctgaaagtcaacattcaagaacatttcatgacgatgctgctccgctatatcaatctacggctcgacgtgaggggacggaaagggcctccaaagagtgaagcacggaaagctttctttgctcggctacgctacttgaagtcaattttccttttcgatatcgtgcccgaattgctggatgacttgactgctgaagagagtgaacttctagaagagatttggtcactcgatcggccttttcttgttgacaatccactcgcctacgcagttgtcgtcaatccaatgtcctttttccctgcgtactgtcggttgtcaagcctatatgaaaagcatggatttcgacagttcagcgcgatacctctgcgccgctctctcatccaaagccatgtgcggatcgacaccatcattctctaccagcatatcctttgcatcgcacgaagagaagcggaaactgttgaaaaggtcgatttatggttgcgcgtctgtaatctgcggaacaaggcttttagatctcgtcgtggaatgtgttttgaaggctcgatcacgacggacggtacctcggtgtcagtttacttgaaacatcctgaagccgacaagtatggaaagcgtggcggtgggaaaaagtcggcaaagaccttagaagctgaggtgaaggcagtatatgtggagaacaacttgcctgcttgtcgagcagcagagaactttgtcgttatcgacccaaacaagcgcgatcttctctactgccaagacaacaagggcaccatcttccgttacaccgccaatcaacgctgcaaggagactggaagccgtcgatttgcaaaagagcggcagcggatgaaagctggcggtattgacctcatagaatcacgtatcccaagccacaagacgatgaacctcatggactttactcgctaccttcttgttcgccgcgcagattcggatcgtcgcaaggaattctactcccaccctgcccacacgcgatggaaatggcacgcattcataaaccgtcagaagagcgaatcagacctcatatccaacatgcacaacaagtttgggaactttaccattgtgatgggagattggagcgatgccggtcgaactgcgagatttcagacctcatcaaagacgaaaggctggcgcaccctctttaagcgcaacaggatcaactgcttccttctcgacgagtacaagacctcatctgtttgcccttgctgttcctctgacgttgaaaaaggcttccaaacacgacctcattcaagaccttatcgacgacgagaaggcaagattgaaaaagtccacggattgctgggttgtaccaaccctaactgtttgcagcaagcctggacatcgggaatgcgctactggaatcgagatacgctgtcaacctgcaacatgctgatgatcgtgcaatcaatgttggatggacatggtagaccagaggtgttcagcaggagccgtagcgtagcgtagattggttagattaggttttccgaaccggttgtcgcgcggttcaatccctggtgcgggtgctagtgccaatacccaccggctccgcactatcaatataaaggtaattagaatttactatctacagaaatatctactttttttcatggtccccctcgaggatccggcgttttctacggggataccgatcaagtacggtaacgcccgctggcttaagtcgactttgttcccactgtacttttagctcgtacaaaatacaatatacttttcatttctccgtaaacaacatgttttcccatgtaatatccttttctatttttcgttccgttaccaactttacacatactttatatagctattcacttctatacactaaaaaactaagacaattttaattttgctgcctgccatatttcaatttgttataaattcctataatttatcctattagtagctaaaaaaagatgaatgtgaatcgaatcctaagagaattcccctcgaagatcgatctggcggcccggccggccgcggccgcactcgagatatctagacccagctttcttgtacaaagtggtgatagcttgtcgagaagtactcgagggggggcccggtacccaattcgccctatagtgagtcgtattacgcgcgctcactggccgtcgttttacaacgtcgtgactgggaaaaccctggcgttacccaacttaatcgccttgcagcacatccccctttcgccagctggcgtaatagcgaagaggcccgcaccgatcgcccttcccaacagttgcgcagcctgaatggcgaatggacgcgccctgtagcggcgcattaagcgcggcgggtgtggtggttacgcgcagcgtgaccgctacacttgccagcgccctagcgcccgctcctttcgctttcttcccttcctttctcgccacgttcgccggctttccccgtcaagctctaaatcgggggctccctttagggttccgatttagtgctttacggcacctcgaccccaaaaaacttgattagggtgatggttcacgtagtgggccatcgccctgatagacggtttttcgccctttgacgttggagtccacgttctttaatagtggactcttgttccaaactggaacaacactcaaccctatctcggtctattcttttgatttataagggattttgccgatttcggcctattggttaaaaaatgagctgatttaacaaaaatttaacgcgaattttaacaaaatattaacgcttacaatttcctgatgcggtattttctccttacgcatctgtgcggtatttcacaccgcatagggtaataactgatataattaaattgaagctctaatttgtgagtttagtatacatgcatttacttataatacagttttttagttttgctggccgcatcttctcaaatatgcttcccagcctgcttttctgtaacgttcaccctctaccttagcatcccttccctttgcaaatagtcctcttccaacaataataatgtcagatcctgtagagaccacatcatccacggttctatactgttgacccaatgcgtctcccttgtcatctaaacccacaccgggtgtcataatcaaccaatcgtaaccttcatctcttccacccatgtctctttgagcaataaagccgataacaaaatctttgtcgctcttcgcaatgtcaacagtacccttagtatattctccagtagatagggagcccttgcatgacaattctgctaacatcaaaaggcctctaggttcctttgttacttcttctgccgcctgcttcaaaccgctaacaatacctgggcccaccacaccgtgtgcattcgtaatgtctgcccattctgctattctgtatacacccgcagagtactgcaatttgactgtattaccaatgtcagcaaattttctgtcttcgaagagtaaaaaattgtacttggcggataatgcctttagcggcttaactgtgccctccatggaaaaatcagtcaagatatccacatgtgtttttagtaaacaaattttgggacctaatgcttcaactaactccagtaattccttggtggtacgaacatccaatgaagcacacaagtttgtttgcttttcgtgcatgatattaaatagcttggcagcaacaggactaggatgagtagcagcacgttccttatatgtagctttcgacatgatttatcttcgtttcctgcaggtttttgttctgtgcagttgggttaagaatactgggcaatttcatgtttcttcaacactacatatgcgtatatataccaatctaagtctgtgctccttccttcgttcttccttctgttcggagattaccgaatcaaaaaaatttcaaggaaaccgaaatcaaaaaaaagaataaaaaaaaaatgatgaattgaaaaggtggtatggtgcactctcagtacaatctgctctgatgccgcatagttaagccagccccgacacccgccaacacccgctgacgcgccctgacgggcttgtctgctcccggcatccgcttacagacaagctgtgaccgtctccgggagctgcatgtgtcagaggttttcaccgtcatcaccgaaacgcgcga

SEQ ID NO: 3911 - RNA, 9706 nt, Saccharomyces cerevisiae
  source 1..9706: mol_type = other RNA
gacgaaagggcctcgtgatacgcctatttttataggttaatgtcatgataataatggtttcttagtatgatccaatatcaaaggaaatgatagcattgaaggatgagactaatccaattgaggagtggcagcatatagaacagctaaagggtagtgctgaaggaagcatacgataccccgcatggaatgggataatatcacaggaggtactagactacctttcatcctacataaatagacgcatataagtacgcatttaagcataaacacgcactatgccgttcttctcatgtatatatatatacaggcaacacgcagatataggtgcgacgtgaacagtgagctgtatgtgcgcagctcgcgttgcattttcggaagcgctcgttttcggaaacgctttgaagttcctattccgaagttcctattctctagaaagtataggaacttcagagcgcttttgaaaaccaaaagcgctctgaagacgcactttcaaaaaaccaaaaacgcaccggactgtaacgagctactaaaatattgcgaataccgcttccacaaacattgctcaaaagtatctctttgctatatatctctgtgctatatccctatataacctacccatccacctttcgctccttgaacttgcatctaaactcgacctctacattttttatgtttatctctagtattactctttagacaaaaaaattgtagtaagaactattcatagagtgaatcgaaaacaatacgaaaatgtaaacatttcctatacgtagtatatagagacaaaatagaagaaaccgttcataattttctgaccaatgaagaatcatcaacgctatcactttctgttcacaaagtatgcgcaatccacatcggtatagaatataatcggggatgcctttatcttgaaaaaatgcacccgcagcttcgctagtaatcagtaaacgcgggaagtggagtcaggctttttttatggaagagaaaatagacaccaaagtagccttcttctaaccttaacggacctacagtgcaaaaagttatcaagagactgcattatagagcgcacaaaggagaaaaaaagtaatctaagatgctttgttagaaaaatagcgctctcgggatgcatttttgtagaacaaaaaagaagtatagattctttgttggtaaaatagcgctctcgcgttgcatttctgttctgtaaaaatgcagctcagattctttgtttgaaaaattagcgctctcgcgttgcatttttgttttacaaaaatgaagcacagattcttcgttggtaaaatagcgctttcgcgttgcatttctgttctgtaaaaatgcagctcagattctttgtttgaaaaattagcgctctcgcgttgcatttttgttctacaaaatgaagcacagatgcttcgttcaggtggcacttttcggggaaatgtgcgcggaacccctatttgtttatttttctaaatacattcaaatatgtatccgctcatgagacaataaccctgataaatgcttcaataatattgaaaaaggaagagtatgagtattcaacatttccgtgtcgcccttattcccttttttgcggcattttgccttcctgtttttgctcacccagaaacgctggtgaaagtaaaagatgctgaagatcagttgggtgcacgagtgggttacatcgaactggatctcaacagcggtaagatccttgagagttttcgccccgaagaacgttttccaatgatgagcacttttaaagttctgctatgtggcgcggtattatcccgtattgacgccgggcaagagcaactcggtcgccgcatacactattctcagaatgacttggttgagtactcaccagtcacagaaaagcatcttacggatggcatgacagtaagagaattatgcagtgctgccataaccatgagtgataacactgcggccaacttacttctgacaacgatcggaggaccgaaggagctaaccgcttttttgcacaacatgggggatcatgtaactcgccttgatcgttgggaaccggagctgaatgaagccataccaaacgacgagcgtgacaccacgatgcctgtagcaatggcaacaacgttgcgcaaactattaactggcgaactacttactctagcttcccggcaacaattaatagactggatggaggcggataaagttgcaggaccacttctgcgctcggcccttccggctggctggtttattgctgataaatctggagccggtgagcgtgggtctcgcggtatcattgcagcactggggccagatggtaagccctcccgtatcgtagttatctacacgacggggagtcaggcaactatggatgaacgaaatagacagatcgctgagataggtgcctcactgattaagcattggtaactgtcagaccaagtttactcatatatactttagattgatttaaaacttcatttttaatttaaaaggatctaggtgaagatcctttttgataatctcatgaccaaaatcccttaacgtgagttttcgttccactgagcgtcagaccccgtagaaaagatcaaaggatcttcttgagatcctttttttctgcgcgtaatctgctgcttgcaaacaaaaaaaccaccgctaccagcggtggtttgtttgccggatcaagagctaccaactctttttccgaaggtaactggcttcagcagagcgcagataccaaatactgttcttctagtgtagccgtagttaggccaccacttcaagaactctgtagcaccgcctacatacctcgctctgctaatcctgttaccagtggctgctgccagtggcgataagtcgtgtcttaccgggttggactcaagacgatagttaccggataaggcgcagcggtcgggctgaacggggggttcgtgcacacagcccagcttggagcgaacgacctacaccgaactgagatacctacagcgtgagctatgagaaagcgccacgcttcccgaagggagaaaggcggacaggtatccggtaagcggcagggtcggaacaggagagcgcacgagggagcttccagggggaaacgcctggtatctttatagtcctgtcgggtttcgccacctctgacttgagcgtcgatttttgtgatgctcgtcaggggggcggagcctatggaaaaacgccagcaacgcggcctttttacggttcctggccttttgctggccttttgctcacatgttctttcctgcgttatcccctgattctgtggataaccgtattaccgcctttgagtgagctgataccgctcgccgcagccgaacgaccgagcgcagcgagtcagtgagcgaggaagcggaagagcgcccaatacgcaaaccgcctctccccgcgcgttggccgattcattaatgcagctggcacgacaggtttcccgactggaaagcgggcagtgagcgcaacgcaattaatgtgagttagctcactcattaggcaccccaggctttacactttatgcttccggctcgtatgttgtgtggaattgtgagcggataacaatttcacacaggaaacagctatgaccatgattacgccaagcgcgcaattaaccctcactaaagggaacaaaagctggagctccaccgcggtggcggcccccgtcccaccatcgggcgcggatcatcacaagtttgtacaaaaaagcaggctctttggccatataggccaccaggtcctgcaggcgcgctcttcaggaggcgcgccaactgccctcttaattaacgaagaagatcggaccggggccgcggatctttgcaaagatccaaaaaaagcatgcgtacggattagaagccgccgagcgggtgacagccctccgaaggaagactctcctccgtgcgtcctcgtcttcaccggtcgcgttcctgaaacgcagatgtgcctcgcgccgcactgctccgaacaataaagattctacaatactagcttttatggttatgaagaggaaaattggcagtaacctggccccacaaacctcaaatgaacgaatcaaattaacaaccagatatctcgactgaaaaaaaaggtttaaaccagttccctgaaattattcccctacttgactaataagtatataaagacggtaggtattgattgtaattctgtaaatctatttcttaaacttcttgaattctacttttatagttagtcttttttttagttttaaaacaccaagaacttagtttcgaataaacacacataaataaaccatgaaatcttctcaccatcaccatcaccatcaccatcaccatggttcttctatgaaaatcgaagaaggtaaactggtaatctggattaacggcgataaaggctataacggtctcgctgaagtcggtaagaaattcgagaaagataccggaattaaagtcaccgttgagcatccggataaactggaagagaaattcccacaggttgcggcaactggcgatggccctgacattatcttctgggcacacgaccgctttggtggctacgctcaatctggcctgttggctgaaatcaccccggacaaagcgttccaggacaagctgtatccgtttacctgggatgccgtacgttacaacggcaagctgattgcttacccgatcgctgttgaagcgttatcgctgatttataacaaagatctgctgccgaacccgccaaaaacctgggaagagatcccggcgctggataaagaactgaaagcgaaaggtaagagcgcgctgatgttcaacctgcaagaaccgtacttcacctggccgctgattgctgctgacgggggttatgcgttcaagtatgaaaacggcaagtacgacattaaagacgtgggcgtggataacgctggcgcgaaagcgggtctgaccttcctggttgacctgattaaaaacaaacacatgaatgcagacaccgattactccatcgcagaagctgcctttaataaaggcgaaacagcgatgaccatcaacggcccgtgggcatggtccaacatcgacaccagcaaagtgaattatggtgtaacggtactgccgaccttcaagggtcaaccatccaaaccgttcgttggcgtgctgagcgcaggtattaacgccgccagtccgaacaaagagctggcaaaagagttcctcgaaaactatctgctgactgatgaaggtctggaagcggttaataaagacaaaccgctgggtgccgtagcgctgaagtcttacgaggaagagttggcgaaagatccacgtattgccgccactatggaaaacgcccagaaaggtgaaatcatgccgaacatcccgcagatgtccgctttctggtatgccgtgcgtactgcggtgatcaacgccgccagcggtcgtcagactgtcgatgaagccctgaaagacgcgcagactaattcgagctcgaacaacaacaacaataacaataacaacaacctcgggatcgaggaaaacctgtacttccaatccaatgcaaccatctctactcaaaatcaggctaagaagagaaaaacgtcaaagagcaaggctgccaaaccatattggaatgaaaatgcagctcatttttcccagcaatggggcctgaatacgatgctaccaacggcggctaaaaaacttggccagaagatcaactctgactcgtggttttctgtgatcaaacatccacaggcgccaattatcaacgactcattgaacttgccgcttagcagtggtgttgaagaggagctaattcgggctcgaaagattcggatctatccgactaattcccagaaagaaacgttgaagaagtggtttggatgccatcgttacatctacaataaagcgctgaagatgcacaaggacggggtgttgatgaatattaaaattctgcgtgaaaaactattgaataagaagacaagcgctttaacaccagaggaacaatggctttccgagtataattatgatttgaaagatgaagcccttcgtgacttggttaaaaactacagtagtaatatggcaaagtttaaaaagactagggtcccttttaagttaaggtttaaaacgaaaaaggcaccagttcaaacgctttcagtgctgaaaaagtactggaacaagggaaagaagacattttacagcgacatatactcgtcctttagcctgcgtggtgcagagccgctcccagaggaattgccacgagattctaggctccaaaggacgaggaacaacaaatattacctaattgttcctatggctggcggggaaatagctcgaaaaccccccacagaaaagtttatatttatcgatcccggggtgagaactttcctaacaggatatgactctagtcagactgtcgtcgagatcggcaaggacgcgattgtacgcatcgagaagcttaagcgccgacgacggcagttgcagtcaaaacttgccaagctcaggaagcacaagaagaggcaaaaccatcggaaagcgttacataggctggacgaaaagatttcgcatatcgttcaggatttgcataagaagtcagccctcttcttgtgcaagtcttatgacagtatttttcttcccaaattaaactttcaccactgcaccaagctgaaccgaaaatcaaggtccagcatggcgactctcgctcactgctccttccacgatcgcttgacgatgaaggcagagcagttccatgatgctagtgttcatgaggttgaagaggattacacgtcgaagacttgctccacttgtggaaagataaaaaatgatctaagatctaataaaatatatagctgtttaggttgcttctcggttttcgacagggacttcaacgcagcaaagaacatcatgctcaagtatatctgtgagcatttgatggcaagtggtggatcttccatttcttctagtttaagtggaggaaatggtcgactcgccatgatgggtcccggacccttcgtacgtaagtacgttgtaagtccctcggagatttaaccgggcgcgacattaagaactcttggcaatcacagaagaatcggctaggagtagtaattatctgatgggggcttccagtacttcattctttgtcggtggggggattttctcacgctatttggccggatgggggctaagcagttatgatagctccgaatttctgtatgagagaggaaggagctacgatagaaaggtactctagcaaacctttaaaaaggtgagccaatctgttctccttcgatgcaatttcttgtcttgggtggctagtctgtgtagctgagccttaatttaccgatgagcaattcttcagtatcttcgagctcttcatcttccctcggggaacagcttaagtcgactttgttcccactgtacttttagctcgtacaaaatacaatatacttttcatttctccgtaaacaacatgttttcccatgtaatatccttttctatttttcgttccgttaccaactttacacatactttatatagctattcacttctatacactaaaaaactaagacaattttaattttgctgcctgccatatttcaatttgttataaattcctataatttatcctattagtagctaaaaaaagatgaatgtgaatcgaatcctaagagaattcccctcgaagatcgatctggcggcccggccggccgcggccgcactcgagatatctagacccagctttcttgtacaaagtggtgatagcttgtcgagaagtactcgagggggggcccggtacccaattcgccctatagtgagtcgtattacgcgcgctcactggccgtcgttttacaacgtcgtgactgggaaaaccctggcgttacccaacttaatcgccttgcagcacatccccctttcgccagctggcgtaatagcgaagaggcccgcaccgatcgcccttcccaacagttgcgcagcctgaatggcgaatggacgcgccctgtagcggcgcattaagcgcggcgggtgtggtggttacgcgcagcgtgaccgctacacttgccagcgccctagcgcccgctcctttcgctttcttcccttcctttctcgccacgttcgccggctttccccgtcaagctctaaatcgggggctccctttagggttccgatttagtgctttacggcacctcgaccccaaaaaacttgattagggtgatggttcacgtagtgggccatcgccctgatagacggtttttcgccctttgacgttggagtccacgttctttaatagtggactcttgttccaaactggaacaacactcaaccctatctcggtctattcttttgatttataagggattttgccgatttcggcctattggttaaaaaatgagctgatttaacaaaaatttaacgcgaattttaacaaaatattaacgcttacaatttcctgatgcggtattttctccttacgcatctgtgcggtatttcacaccgcatagggtaataactgatataattaaattgaagctctaatttgtgagtttagtatacatgcatttacttataatacagttttttagttttgctggccgcatcttctcaaatatgcttcccagcctgcttttctgtaacgttcaccctctaccttagcatcccttccctttgcaaatagtcctcttccaacaataataatgtcagatcctgtagagaccacatcatccacggttctatactgttgacccaatgcgtctcccttgtcatctaaacccacaccgggtgtcataatcaaccaatcgtaaccttcatctcttccacccatgtctctttgagcaataaagccgataacaaaatctttgtcgctcttcgcaatgtcaacagtacccttagtatattctccagtagatagggagcccttgcatgacaattctgctaacatcaaaaggcctctaggttcctttgttacttcttctgccgcctgcttcaaaccgctaacaatacctgggcccaccacaccgtgtgcattcgtaatgtctgcccattctgctattctgtatacacccgcagagtactgcaatttgactgtattaccaatgtcagcaaattttctgtcttcgaagagtaaaaaattgtacttggcggataatgcctttagcggcttaactgtgccctccatggaaaaatcagtcaagatatccacatgtgtttttagtaaacaaattttgggacctaatgcttcaactaactccagtaattccttggtggtacgaacatccaatgaagcacacaagtttgtttgcttttcgtgcatgatattaaatagcttggcagcaacaggactaggatgagtagcagcacgttccttatatgtagctttcgacatgatttatcttcgtttcctgcaggtttttgttctgtgcagttgggttaagaatactgggcaatttcatgtttcttcaacactacatatgcgtatatataccaatctaagtctgtgctccttccttcgttcttccttctgttcggagattaccgaatcaaaaaaatttcaaggaaaccgaaatcaaaaaaaagaataaaaaaaaaatgatgaattgaaaaggtggtatggtgcactctcagtacaatctgctctgatgccgcatagttaagccagccccgacacccgccaacacccgctgacgcgccctgacgggcttgtctgctcccggcatccgcttacagacaagctgtgaccgtctccgggagctgcatgtgtcagaggttttcaccgtcatcaccgaaacgcgcga

SEQ ID NO: 3912 - RNA, 9848 nt, Saccharomyces cerevisiae
  source 1..9848: mol_type = other RNA
gacgaaagggcctcgtgatacgcctatttttataggttaatgtcatgataataatggtttcttagtatgatccaatatcaaaggaaatgatagcattgaaggatgagactaatccaattgaggagtggcagcatatagaacagctaaagggtagtgctgaaggaagcatacgataccccgcatggaatgggataatatcacaggaggtactagactacctttcatcctacataaatagacgcatataagtacgcatttaagcataaacacgcactatgccgttcttctcatgtatatatatatacaggcaacacgcagatataggtgcgacgtgaacagtgagctgtatgtgcgcagctcgcgttgcattttcggaagcgctcgttttcggaaacgctttgaagttcctattccgaagttcctattctctagaaagtataggaacttcagagcgcttttgaaaaccaaaagcgctctgaagacgcactttcaaaaaaccaaaaacgcaccggactgtaacgagctactaaaatattgcgaataccgcttccacaaacattgctcaaaagtatctctttgctatatatctctgtgctatatccctatataacctacccatccacctttcgctccttgaacttgcatctaaactcgacctctacattttttatgtttatctctagtattactctttagacaaaaaaattgtagtaagaactattcatagagtgaatcgaaaacaatacgaaaatgtaaacatttcctatacgtagtatatagagacaaaatagaagaaaccgttcataattttctgaccaatgaagaatcatcaacgctatcactttctgttcacaaagtatgcgcaatccacatcggtatagaatataatcggggatgcctttatcttgaaaaaatgcacccgcagcttcgctagtaatcagtaaacgcgggaagtggagtcaggctttttttatggaagagaaaatagacaccaaagtagccttcttctaaccttaacggacctacagtgcaaaaagttatcaagagactgcattatagagcgcacaaaggagaaaaaaagtaatctaagatgctttgttagaaaaatagcgctctcgggatgcatttttgtagaacaaaaaagaagtatagattctttgttggtaaaatagcgctctcgcgttgcatttctgttctgtaaaaatgcagctcagattctttgtttgaaaaattagcgctctcgcgttgcatttttgttttacaaaaatgaagcacagattcttcgttggtaaaatagcgctttcgcgttgcatttctgttctgtaaaaatgcagctcagattctttgtttgaaaaattagcgctctcgcgttgcatttttgttctacaaaatgaagcacagatgcttcgttcaggtggcacttttcggggaaatgtgcgcggaacccctatttgtttatttttctaaatacattcaaatatgtatccgctcatgagacaataaccctgataaatgcttcaataatattgaaaaaggaagagtatgagtattcaacatttccgtgtcgcccttattcccttttttgcggcattttgccttcctgtttttgctcacccagaaacgctggtgaaagtaaaagatgctgaagatcagttgggtgcacgagtgggttacatcgaactggatctcaacagcggtaagatccttgagagttttcgccccgaagaacgttttccaatgatgagcacttttaaagttctgctatgtggcgcggtattatcccgtattgacgccgggcaagagcaactcggtcgccgcatacactattctcagaatgacttggttgagtactcaccagtcacagaaaagcatcttacggatggcatgacagtaagagaattatgcagtgctgccataaccatgagtgataacactgcggccaacttacttctgacaacgatcggaggaccgaaggagctaaccgcttttttgcacaacatgggggatcatgtaactcgccttgatcgttgggaaccggagctgaatgaagccataccaaacgacgagcgtgacaccacgatgcctgtagcaatggcaacaacgttgcgcaaactattaactggcgaactacttactctagcttcccggcaacaattaatagactggatggaggcggataaagttgcaggaccacttctgcgctcggcccttccggctggctggtttattgctgataaatctggagccggtgagcgtgggtctcgcggtatcattgcagcactggggccagatggtaagccctcccgtatcgtagttatctacacgacggggagtcaggcaactatggatgaacgaaatagacagatcgctgagataggtgcctcactgattaagcattggtaactgtcagaccaagtttactcatatatactttagattgatttaaaacttcatttttaatttaaaaggatctaggtgaagatcctttttgataatctcatgaccaaaatcccttaacgtgagttttcgttccactgagcgtcagaccccgtagaaaagatcaaaggatcttcttgagatcctttttttctgcgcgtaatctgctgcttgcaaacaaaaaaaccaccgctaccagcggtggtttgtttgccggatcaagagctaccaactctttttccgaaggtaactggcttcagcagagcgcagataccaaatactgttcttctagtgtagccgtagttaggccaccacttcaagaactctgtagcaccgcctacatacctcgctctgctaatcctgttaccagtggctgctgccagtggcgataagtcgtgtcttaccgggttggactcaagacgatagttaccggataaggcgcagcggtcgggctgaacggggggttcgtgcacacagcccagcttggagcgaacgacctacaccgaactgagatacctacagcgtgagctatgagaaagcgccacgcttcccgaagggagaaaggcggacaggtatccggtaagcggcagggtcggaacaggagagcgcacgagggagcttccagggggaaacgcctggtatctttatagtcctgtcgggtttcgccacctctgacttgagcgtcgatttttgtgatgctcgtcaggggggcggagcctatggaaaaacgccagcaacgcggcctttttacggttcctggccttttgctggccttttgctcacatgttctttcctgcgttatcccctgattctgtggataaccgtattaccgcctttgagtgagctgataccgctcgccgcagccgaacgaccgagcgcagcgagtcagtgagcgaggaagcggaagagcgcccaatacgcaaaccgcctctccccgcgcgttggccgattcattaatgcagctggcacgacaggtttcccgactggaaagcgggcagtgagcgcaacgcaattaatgtgagttagctcactcattaggcaccccaggctttacactttatgcttccggctcgtatgttgtgtggaattgtgagcggataacaatttcacacaggaaacagctatgaccatgattacgccaagcgcgcaattaaccctcactaaagggaacaaaagctggagctccaccgcggtggcggcccccgtcccaccatcgggcgcggatcatcacaagtttgtacaaaaaagcaggctctttggccatataggccaccaggtcctgcaggcgcgctcttcaggaggcgcgccaactgccctcttaattaacgaagaagatcggaccggggccgcggatctttgcaaagatccaaaaaaagcatgcgtacggattagaagccgccgagcgggtgacagccctccgaaggaagactctcctccgtgcgtcctcgtcttcaccggtcgcgttcctgaaacgcagatgtgcctcgcgccgcactgctccgaacaataaagattctacaatactagcttttatggttatgaagaggaaaattggcagtaacctggccccacaaacctcaaatgaacgaatcaaattaacaaccagatatctcgactgaaaaaaaaggtttaaaccagttccctgaaattattcccctacttgactaataagtatataaagacggtaggtattgattgtaattctgtaaatctatttcttaaacttcttgaattctacttttatagttagtcttttttttagttttaaaacaccaagaacttagtttcgaataaacacacataaataaaccatgaaatcttctcaccatcaccatcaccatcaccatcaccatggttcttctatgaaaatcgaagaaggtaaactggtaatctggattaacggcgataaaggctataacggtctcgctgaagtcggtaagaaattcgagaaagataccggaattaaagtcaccgttgagcatccggataaactggaagagaaattcccacaggttgcggcaactggcgatggccctgacattatcttctgggcacacgaccgctttggtggctacgctcaatctggcctgttggctgaaatcaccccggacaaagcgttccaggacaagctgtatccgtttacctgggatgccgtacgttacaacggcaagctgattgcttacccgatcgctgttgaagcgttatcgctgatttataacaaagatctgctgccgaacccgccaaaaacctgggaagagatcccggcgctggataaagaactgaaagcgaaaggtaagagcgcgctgatgttcaacctgcaagaaccgtacttcacctggccgctgattgctgctgacgggggttatgcgttcaagtatgaaaacggcaagtacgacattaaagacgtgggcgtggataacgctggcgcgaaagcgggtctgaccttcctggttgacctgattaaaaacaaacacatgaatgcagacaccgattactccatcgcagaagctgcctttaataaaggcgaaacagcgatgaccatcaacggcccgtgggcatggtccaacatcgacaccagcaaagtgaattatggtgtaacggtactgccgaccttcaagggtcaaccatccaaaccgttcgttggcgtgctgagcgcaggtattaacgccgccagtccgaacaaagagctggcaaaagagttcctcgaaaactatctgctgactgatgaaggtctggaagcggttaataaagacaaaccgctgggtgccgtagcgctgaagtcttacgaggaagagttggcgaaagatccacgtattgccgccactatggaaaacgcccagaaaggtgaaatcatgccgaacatcccgcagatgtccgctttctggtatgccgtgcgtactgcggtgatcaacgccgccagcggtcgtcagactgtcgatgaagccctgaaagacgcgcagactaattcgagctcgaacaacaacaacaataacaataacaacaacctcgggatcgaggaaaacctgtacttccaatccaatgcaaacctactcatcctcctactaatccatctcttgcacacggcatcattccattctgggatgagtactcacaacaagtatcggataaactttgggcatgttcaagagattcctttcatgagtttaatcagtacaacaacaagggatgcactgacggatggttcaacttttctcaattcactgtgattgaatcccagccagtatttgatgttccactcaatgttcatcactctataacagagaatgtggcttttgataactctaaaaagccacctcagctcaagaaggcaaagaagggtcagaagactccccaaaaatttcaagcggacaaatcaatgaaaattcgtctctaccccaatgaacaagaaaggacaacattgaatcagtggatgggaactgctcgttggatctacaacaagtgtttagaattcaccaacaaatccaaaggtgtcaagaaaaataagaagaatttcagaacgtttgtggtgaacaacgataattatcagacagaaaatcagtgggttgtaaatactccttatgacgtaagagatgctgccgctattgaattgttaactgcgttcaacactaattttgaaaagaagaaggctggaacgattgacaagttcatgatccgtttcaggcgaaagaaagacagaaaagatcatttcgttctgcgttgcaagcactggaagaaaaagagtggaatgtattcttttataaggaacatcaagagcgccgaacctttgcctgaggagcttcagtatgattccatcattattaagaacaagttgaaccattattatttatgtattccacaagtactggatattaggggtgagaaccaagcccctcaacattcaggacaagttgtagcattggatccaggagtaagaacatttcagaccacctttgatttgaatggttattcaaccaaatggggctcaggaggtgccgaaagaattggtagattgtgttgcgcgtatgacaagttacaatcgaagtggtctcaaccagaagtcagacattgcaaaagatacaagtacaagagagcaggaagaagaattcaacaaaagattagaaatattgtggatgatttacacaagaaactgtgtttgtggctgtgtcgaaactaccaagtgatcttacttccttcgtttgagactcagaaaatggtaaagaaactccacaggagaattaatagcaagacagcaagaaaaatgttgacttggtcacattacagattcaagcaaagattgcttcacaaagctagagagcatccgtggacacacatttatattgtcaacgaagcgtatacatccaaaacttgctcatgttgtggacatgtttatacggttggatcatcggaagtgtttcgttgtccatcatgtggctcaatttttgacagagatatcaatggagccagaaatattcttcttcgattccttactactcatagaattagtttttgagcaccttgtgtgttgggtcttccccaccttgtgtgcgttgggtcctttcccctggctttcactctttgagtgtttgcttgcaagatcagcactttgttcgatttgtttgttttgttcaaattgttgatttaaataaaggcgacattcttcatctctcaaaccacacatcgaaattgatgcatgaacccaaagacaataaatttggcaataaaaaaaaattctgaaggcggttgcccgtgttgagtgtgccacatagaaaacacccgagcctcattctcatcatccgagagccaaattcctttttgaatttgaatcatcattgttgaatttttatacaagagtttcatctcaaaaacattgctgtccccgagattttaaaaagatcatcatcatcagaaaattcatatgggaggaatttgctcaaccatgtccaccagtacaacattaccagtccagaaatttagacctattgtcatttgtggtcctagcggagttggaaaaggaagcttaagtcgactttgttcccactgtacttttagctcgtacaaaatacaatatacttttcatttctccgtaaacaacatgttttcccatgtaatatccttttctatttttcgttccgttaccaactttacacatactttatatagctattcacttctatacactaaaaaactaagacaattttaattttgctgcctgccatatttcaatttgttataaattcctataatttatcctattagtagctaaaaaaagatgaatgtgaatcgaatcctaagagaattcccctcgaagatcgatctggcggcccggccggccgcggccgcactcgagatatctagacccagctttcttgtacaaagtggtgatagcttgtcgagaagtactcgagggggggcccggtacccaattcgccctatagtgagtcgtattacgcgcgctcactggccgtcgttttacaacgtcgtgactgggaaaaccctggcgttacccaacttaatcgccttgcagcacatccccctttcgccagctggcgtaatagcgaagaggcccgcaccgatcgcccttcccaacagttgcgcagcctgaatggcgaatggacgcgccctgtagcggcgcattaagcgcggcgggtgtggtggttacgcgcagcgtgaccgctacacttgccagcgccctagcgcccgctcctttcgctttcttcccttcctttctcgccacgttcgccggctttccccgtcaagctctaaatcgggggctccctttagggttccgatttagtgctttacggcacctcgaccccaaaaaacttgattagggtgatggttcacgtagtgggccatcgccctgatagacggtttttcgccctttgacgttggagtccacgttctttaatagtggactcttgttccaaactggaacaacactcaaccctatctcggtctattcttttgatttataagggattttgccgatttcggcctattggttaaaaaatgagctgatttaacaaaaatttaacgcgaattttaacaaaatattaacgcttacaatttcctgatgcggtattttctccttacgcatctgtgcggtatttcacaccgcatagggtaataactgatataattaaattgaagctctaatttgtgagtttagtatacatgcatttacttataatacagttttttagttttgctggccgcatcttctcaaatatgcttcccagcctgcttttctgtaacgttcaccctctaccttagcatcccttccctttgcaaatagtcctcttccaacaataataatgtcagatcctgtagagaccacatcatccacggttctatactgttgacccaatgcgtctcccttgtcatctaaacccacaccgggtgtcataatcaaccaatcgtaaccttcatctcttccacccatgtctctttgagcaataaagccgataacaaaatctttgtcgctcttcgcaatgtcaacagtacccttagtatattctccagtagatagggagcccttgcatgacaattctgctaacatcaaaaggcctctaggttcctttgttacttcttctgccgcctgcttcaaaccgctaacaatacctgggcccaccacaccgtgtgcattcgtaatgtctgcccattctgctattctgtatacacccgcagagtactgcaatttgactgtattaccaatgtcagcaaattttctgtcttcgaagagtaaaaaattgtacttggcggataatgcctttagcggcttaactgtgccctccatggaaaaatcagtcaagatatccacatgtgtttttagtaaacaaattttgggacctaatgcttcaactaactccagtaattccttggtggtacgaacatccaatgaagcacacaagtttgtttgcttttcgtgcatgatattaaatagcttggcagcaacaggactaggatgagtagcagcacgttccttatatgtagctttcgacatgatttatcttcgtttcctgcaggtttttgttctgtgcagttgggttaagaatactgggcaatttcatgtttcttcaacactacatatgcgtatatataccaatctaagtctgtgctccttccttcgttcttccttctgttcggagattaccgaatcaaaaaaatttcaaggaaaccgaaatcaaaaaaaagaataaaaaaaaaatgatgaattgaaaaggtggtatggtgcactctcagtacaatctgctctgatgccgcatagttaagccagccccgacacccgccaacacccgctgacgcgccctgacgggcttgtctgctcccggcatccgcttacagacaagctgtgaccgtctccgggagctgcatgtgtcagaggttttcaccgtcatcaccgaaacgcgcga

SEQ ID NO: 3913 - RNA, 9690 nt, Saccharomyces cerevisiae
  source 1..9690: mol_type = other RNA
gacgaaagggcctcgtgatacgcctatttttataggttaatgtcatgataataatggtttcttagtatgatccaatatcaaaggaaatgatagcattgaaggatgagactaatccaattgaggagtggcagcatatagaacagctaaagggtagtgctgaaggaagcatacgataccccgcatggaatgggataatatcacaggaggtactagactacctttcatcctacataaatagacgcatataagtacgcatttaagcataaacacgcactatgccgttcttctcatgtatatatatatacaggcaacacgcagatataggtgcgacgtgaacagtgagctgtatgtgcgcagctcgcgttgcattttcggaagcgctcgttttcggaaacgctttgaagttcctattccgaagttcctattctctagaaagtataggaacttcagagcgcttttgaaaaccaaaagcgctctgaagacgcactttcaaaaaaccaaaaacgcaccggactgtaacgagctactaaaatattgcgaataccgcttccacaaacattgctcaaaagtatctctttgctatatatctctgtgctatatccctatataacctacccatccacctttcgctccttgaacttgcatctaaactcgacctctacattttttatgtttatctctagtattactctttagacaaaaaaattgtagtaagaactattcatagagtgaatcgaaaacaatacgaaaatgtaaacatttcctatacgtagtatatagagacaaaatagaagaaaccgttcataattttctgaccaatgaagaatcatcaacgctatcactttctgttcacaaagtatgcgcaatccacatcggtatagaatataatcggggatgcctttatcttgaaaaaatgcacccgcagcttcgctagtaatcagtaaacgcgggaagtggagtcaggctttttttatggaagagaaaatagacaccaaagtagccttcttctaaccttaacggacctacagtgcaaaaagttatcaagagactgcattatagagcgcacaaaggagaaaaaaagtaatctaagatgctttgttagaaaaatagcgctctcgggatgcatttttgtagaacaaaaaagaagtatagattctttgttggtaaaatagcgctctcgcgttgcatttctgttctgtaaaaatgcagctcagattctttgtttgaaaaattagcgctctcgcgttgcatttttgttttacaaaaatgaagcacagattcttcgttggtaaaatagcgctttcgcgttgcatttctgttctgtaaaaatgcagctcagattctttgtttgaaaaattagcgctctcgcgttgcatttttgttctacaaaatgaagcacagatgcttcgttcaggtggcacttttcggggaaatgtgcgcggaacccctatttgtttatttttctaaatacattcaaatatgtatccgctcatgagacaataaccctgataaatgcttcaataatattgaaaaaggaagagtatgagtattcaacatttccgtgtcgcccttattcccttttttgcggcattttgccttcctgtttttgctcacccagaaacgctggtgaaagtaaaagatgctgaagatcagttgggtgcacgagtgggttacatcgaactggatctcaacagcggtaagatccttgagagttttcgccccgaagaacgttttccaatgatgagcacttttaaagttctgctatgtggcgcggtattatcccgtattgacgccgggcaagagcaactcggtcgccgcatacactattctcagaatgacttggttgagtactcaccagtcacagaaaagcatcttacggatggcatgacagtaagagaattatgcagtgctgccataaccatgagtgataacactgcggccaacttacttctgacaacgatcggaggaccgaaggagctaaccgcttttttgcacaacatgggggatcatgtaactcgccttgatcgttgggaaccggagctgaatgaagccataccaaacgacgagcgtgacaccacgatgcctgtagcaatggcaacaacgttgcgcaaactattaactggcgaactacttactctagcttcccggcaacaattaatagactggatggaggcggataaagttgcaggaccacttctgcgctcggcccttccggctggctggtttattgctgataaatctggagccggtgagcgtgggtctcgcggtatcattgcagcactggggccagatggtaagccctcccgtatcgtagttatctacacgacggggagtcaggcaactatggatgaacgaaatagacagatcgctgagataggtgcctcactgattaagcattggtaactgtcagaccaagtttactcatatatactttagattgatttaaaacttcatttttaatttaaaaggatctaggtgaagatcctttttgataatctcatgaccaaaatcccttaacgtgagttttcgttccactgagcgtcagaccccgtagaaaagatcaaaggatcttcttgagatcctttttttctgcgcgtaatctgctgcttgcaaacaaaaaaaccaccgctaccagcggtggtttgtttgccggatcaagagctaccaactctttttccgaaggtaactggcttcagcagagcgcagataccaaatactgttcttctagtgtagccgtagttaggccaccacttcaagaactctgtagcaccgcctacatacctcgctctgctaatcctgttaccagtggctgctgccagtggcgataagtcgtgtcttaccgggttggactcaagacgatagttaccggataaggcgcagcggtcgggctgaacggggggttcgtgcacacagcccagcttggagcgaacgacctacaccgaactgagatacctacagcgtgagctatgagaaagcgccacgcttcccgaagggagaaaggcggacaggtatccggtaagcggcagggtcggaacaggagagcgcacgagggagcttccagggggaaacgcctggtatctttatagtcctgtcgggtttcgccacctctgacttgagcgtcgatttttgtgatgctcgtcaggggggcggagcctatggaaaaacgccagcaacgcggcctttttacggttcctggccttttgctggccttttgctcacatgttctttcctgcgttatcccctgattctgtggataaccgtattaccgcctttgagtgagctgataccgctcgccgcagccgaacgaccgagcgcagcgagtcagtgagcgaggaagcggaagagcgcccaatacgcaaaccgcctctccccgcgcgttggccgattcattaatgcagctggcacgacaggtttcccgactggaaagcgggcagtgagcgcaacgcaattaatgtgagttagctcactcattaggcaccccaggctttacactttatgcttccggctcgtatgttgtgtggaattgtgagcggataacaatttcacacaggaaacagctatgaccatgattacgccaagcgcgcaattaaccctcactaaagggaacaaaagctggagctccaccgcggtggcggcccccgtcccaccatcgggcgcggatcatcacaagtttgtacaaaaaagcaggctctttggccatataggccaccaggtcctgcaggcgcgctcttcaggaggcgcgccaactgccctcttaattaacgaagaagatcggaccggggccgcggatctttgcaaagatccaaaaaaagcatgcgtacggattagaagccgccgagcgggtgacagccctccgaaggaagactctcctccgtgcgtcctcgtcttcaccggtcgcgttcctgaaacgcagatgtgcctcgcgccgcactgctccgaacaataaagattctacaatactagcttttatggttatgaagaggaaaattggcagtaacctggccccacaaacctcaaatgaacgaatcaaattaacaaccagatatctcgactgaaaaaaaaggtttaaaccagttccctgaaattattcccctacttgactaataagtatataaagacggtaggtattgattgtaattctgtaaatctatttcttaaacttcttgaattctacttttatagttagtcttttttttagttttaaaacaccaagaacttagtttcgaataaacacacataaataaaccatgaaatcttctcaccatcaccatcaccatcaccatcaccatggttcttctatgaaaatcgaagaaggtaaactggtaatctggattaacggcgataaaggctataacggtctcgctgaagtcggtaagaaattcgagaaagataccggaattaaagtcaccgttgagcatccggataaactggaagagaaattcccacaggttgcggcaactggcgatggccctgacattatcttctgggcacacgaccgctttggtggctacgctcaatctggcctgttggctgaaatcaccccggacaaagcgttccaggacaagctgtatccgtttacctgggatgccgtacgttacaacggcaagctgattgcttacccgatcgctgttgaagcgttatcgctgatttataacaaagatctgctgccgaacccgccaaaaacctgggaagagatcccggcgctggataaagaactgaaagcgaaaggtaagagcgcgctgatgttcaacctgcaagaaccgtacttcacctggccgctgattgctgctgacgggggttatgcgttcaagtatgaaaacggcaagtacgacattaaagacgtgggcgtggataacgctggcgcgaaagcgggtctgaccttcctggttgacctgattaaaaacaaacacatgaatgcagacaccgattactccatcgcagaagctgcctttaataaaggcgaaacagcgatgaccatcaacggcccgtgggcatggtccaacatcgacaccagcaaagtgaattatggtgtaacggtactgccgaccttcaagggtcaaccatccaaaccgttcgttggcgtgctgagcgcaggtattaacgccgccagtccgaacaaagagctggcaaaagagttcctcgaaaactatctgctgactgatgaaggtctggaagcggttaataaagacaaaccgctgggtgccgtagcgctgaagtcttacgaggaagagttggcgaaagatccacgtattgccgccactatggaaaacgcccagaaaggtgaaatcatgccgaacatcccgcagatgtccgctttctggtatgccgtgcgtactgcggtgatcaacgccgccagcggtcgtcagactgtcgatgaagccctgaaagacgcgcagactaattcgagctcgaacaacaacaacaataacaataacaacaacctcgggatcgaggaaaacctgtacttccaatccaatgcaaagagaagtagagaggatgaacctactcatcctcctactaatccatctcttgcacacggcatcattccattctggaatgagtactcacaacaagtatcggataaactttgggcatgttcaagagattcctttcatgagtttaatcagtacaacaacaagggatgcacagacggatggttcaacttttctcaattcactgtgattgaatccaagccagtgtttgatgttccactcaatgtccatcactctataacagagaatgtggcttttgataactctaaaaagccacctcagctcaagaaagcaaaaaagaatcaaaagacgccccaaaaattgcaagcagacaaatcattgaaaatccgactctaccccaatgaacaagaaaggacaacattgaatcagtggatgggaactgctcgttggatctacaacaagtgcttagaatttacacacaatttcaaagatgtcaagaaaaataagaagaatttcagaacgtttgtggtgaataacgataattatcagacagaaaatcagtgggttgtgaatactccttatgacgtaagagacgctgccgctattgaattgttgactgcgttcaacactaattttgaaaagaagaaggctggaatgattgacaagttcatgatccgtttcaggcgaaagaaagacagaaaagatcattttgttctacattgcaagcactggaagaaaaagagtggactgtattcttttataaggaatatcaagagtgccgaacctttgcctgaggagcttcagtatgattccatcattattaagaacaagctgaaccattattatttatgtattccacaagtactggatattaggggtgagaaccaagcccctcaacattcaggacaagttgtagcattggatccaggagttagaacatttcagaccacctttgatttgaacggttattcaaccaaatggggctcaggaggtgccgaaagaattggtagattgtgttgcgcgtatgacaagttacaatcgaagtggtctcaaccagaagtcagacattgcaaaagatacaagtacaagagagcaggaagaagaattcaacaaaagattagaaatattgtggatgatttacacaagaaactgtgtttgtggttgtgtcgaaactaccaagtgatcttacttccttcgtttgagactcagaaaatggtaaagaaactccataggagaattaatagcaagacagcaagaaaaatgttgacttggtcacattacagattcaagcaaagattgcttcacaaagctagagagcatccgtggacacacatttatattgtcaacgaagcgtacacatccaaaacttgctcatgttgtggacatgtttatacggttggatcatctgaagtgtttcgttgtccatcatgtggctcaatttttgacagagatatcaatggagccagaaatattcttcttcgattccttactactcatggaattagtttttgagcaccttgtgtgttgggtcttccccaccttgtgtgcgttgggtcctttcccctggctttcactctttgagtgtttgcttgcaagatcagcactttgttcgatttgtttgttttgttcaaattgttgatttaaataaaggcgttgttgcttgtttcagaatttttcaagtgatgattcaacaaatcatgagttgttgtattcgtgtttttcaaattagaaattgtaggatcggttgttggatggtcgttagcgtctgtatgatcttgttcgtgattggttttgggtacatttctcttcttgttatgatgggaagaagaagtcttgtaatgcttaagtcgactttgttcccactgtacttttagctcgtacaaaatacaatatacttttcatttctccgtaaacaacatgttttcccatgtaatatccttttctatttttcgttccgttaccaactttacacatactttatatagctattcacttctatacactaaaaaactaagacaattttaattttgctgcctgccatatttcaatttgttataaattcctataatttatcctattagtagctaaaaaaagatgaatgtgaatcgaatcctaagagaattcccctcgaagatcgatctggcggcccggccggccgcggccgcactcgagatatctagacccagctttcttgtacaaagtggtgatagcttgtcgagaagtactcgagggggggcccggtacccaattcgccctatagtgagtcgtattacgcgcgctcactggccgtcgttttacaacgtcgtgactgggaaaaccctggcgttacccaacttaatcgccttgcagcacatccccctttcgccagctggcgtaatagcgaagaggcccgcaccgatcgcccttcccaacagttgcgcagcctgaatggcgaatggacgcgccctgtagcggcgcattaagcgcggcgggtgtggtggttacgcgcagcgtgaccgctacacttgccagcgccctagcgcccgctcctttcgctttcttcccttcctttctcgccacgttcgccggctttccccgtcaagctctaaatcgggggctccctttagggttccgatttagtgctttacggcacctcgaccccaaaaaacttgattagggtgatggttcacgtagtgggccatcgccctgatagacggtttttcgccctttgacgttggagtccacgttctttaatagtggactcttgttccaaactggaacaacactcaaccctatctcggtctattcttttgatttataagggattttgccgatttcggcctattggttaaaaaatgagctgatttaacaaaaatttaacgcgaattttaacaaaatattaacgcttacaatttcctgatgcggtattttctccttacgcatctgtgcggtatttcacaccgcatagggtaataactgatataattaaattgaagctctaatttgtgagtttagtatacatgcatttacttataatacagttttttagttttgctggccgcatcttctcaaatatgcttcccagcctgcttttctgtaacgttcaccctctaccttagcatcccttccctttgcaaatagtcctcttccaacaataataatgtcagatcctgtagagaccacatcatccacggttctatactgttgacccaatgcgtctcccttgtcatctaaacccacaccgggtgtcataatcaaccaatcgtaaccttcatctcttccacccatgtctctttgagcaataaagccgataacaaaatctttgtcgctcttcgcaatgtcaacagtacccttagtatattctccagtagatagggagcccttgcatgacaattctgctaacatcaaaaggcctctaggttcctttgttacttcttctgccgcctgcttcaaaccgctaacaatacctgggcccaccacaccgtgtgcattcgtaatgtctgcccattctgctattctgtatacacccgcagagtactgcaatttgactgtattaccaatgtcagcaaattttctgtcttcgaagagtaaaaaattgtacttggcggataatgcctttagcggcttaactgtgccctccatggaaaaatcagtcaagatatccacatgtgtttttagtaaacaaattttgggacctaatgcttcaactaactccagtaattccttggtggtacgaacatccaatgaagcacacaagtttgtttgcttttcgtgcatgatattaaatagcttggcagcaacaggactaggatgagtagcagcacgttccttatatgtagctttcgacatgatttatcttcgtttcctgcaggtttttgttctgtgcagttgggttaagaatactgggcaatttcatgtttcttcaacactacatatgcgtatatataccaatctaagtctgtgctccttccttcgttcttccttctgttcggagattaccgaatcaaaaaaatttcaaggaaaccgaaatcaaaaaaaagaataaaaaaaaaatgatgaattgaaaaggtggtatggtgcactctcagtacaatctgctctgatgccgcatagttaagccagccccgacacccgccaacacccgctgacgcgccctgacgggcttgtctgctcccggcatccgcttacagacaagctgtgaccgtctccgggagctgcatgtgtcagaggttttcaccgtcatcaccgaaacgcgcga

SEQ ID NO: 3914 - RNA, 9732 nt, Saccharomyces cerevisiae
  source 1..9732: mol_type = other RNA
gacgaaagggcctcgtgatacgcctatttttataggttaatgtcatgataataatggtttcttagtatgatccaatatcaaaggaaatgatagcattgaaggatgagactaatccaattgaggagtggcagcatatagaacagctaaagggtagtgctgaaggaagcatacgataccccgcatggaatgggataatatcacaggaggtactagactacctttcatcctacataaatagacgcatataagtacgcatttaagcataaacacgcactatgccgttcttctcatgtatatatatatacaggcaacacgcagatataggtgcgacgtgaacagtgagctgtatgtgcgcagctcgcgttgcattttcggaagcgctcgttttcggaaacgctttgaagttcctattccgaagttcctattctctagaaagtataggaacttcagagcgcttttgaaaaccaaaagcgctctgaagacgcactttcaaaaaaccaaaaacgcaccggactgtaacgagctactaaaatattgcgaataccgcttccacaaacattgctcaaaagtatctctttgctatatatctctgtgctatatccctatataacctacccatccacctttcgctccttgaacttgcatctaaactcgacctctacattttttatgtttatctctagtattactctttagacaaaaaaattgtagtaagaactattcatagagtgaatcgaaaacaatacgaaaatgtaaacatttcctatacgtagtatatagagacaaaatagaagaaaccgttcataattttctgaccaatgaagaatcatcaacgctatcactttctgttcacaaagtatgcgcaatccacatcggtatagaatataatcggggatgcctttatcttgaaaaaatgcacccgcagcttcgctagtaatcagtaaacgcgggaagtggagtcaggctttttttatggaagagaaaatagacaccaaagtagccttcttctaaccttaacggacctacagtgcaaaaagttatcaagagactgcattatagagcgcacaaaggagaaaaaaagtaatctaagatgctttgttagaaaaatagcgctctcgggatgcatttttgtagaacaaaaaagaagtatagattctttgttggtaaaatagcgctctcgcgttgcatttctgttctgtaaaaatgcagctcagattctttgtttgaaaaattagcgctctcgcgttgcatttttgttttacaaaaatgaagcacagattcttcgttggtaaaatagcgctttcgcgttgcatttctgttctgtaaaaatgcagctcagattctttgtttgaaaaattagcgctctcgcgttgcatttttgttctacaaaatgaagcacagatgcttcgttcaggtggcacttttcggggaaatgtgcgcggaacccctatttgtttatttttctaaatacattcaaatatgtatccgctcatgagacaataaccctgataaatgcttcaataatattgaaaaaggaagagtatgagtattcaacatttccgtgtcgcccttattcccttttttgcggcattttgccttcctgtttttgctcacccagaaacgctggtgaaagtaaaagatgctgaagatcagttgggtgcacgagtgggttacatcgaactggatctcaacagcggtaagatccttgagagttttcgccccgaagaacgttttccaatgatgagcacttttaaagttctgctatgtggcgcggtattatcccgtattgacgccgggcaagagcaactcggtcgccgcatacactattctcagaatgacttggttgagtactcaccagtcacagaaaagcatcttacggatggcatgacagtaagagaattatgcagtgctgccataaccatgagtgataacactgcggccaacttacttctgacaacgatcggaggaccgaaggagctaaccgcttttttgcacaacatgggggatcatgtaactcgccttgatcgttgggaaccggagctgaatgaagccataccaaacgacgagcgtgacaccacgatgcctgtagcaatggcaacaacgttgcgcaaactattaactggcgaactacttactctagcttcccggcaacaattaatagactggatggaggcggataaagttgcaggaccacttctgcgctcggcccttccggctggctggtttattgctgataaatctggagccggtgagcgtgggtctcgcggtatcattgcagcactggggccagatggtaagccctcccgtatcgtagttatctacacgacggggagtcaggcaactatggatgaacgaaatagacagatcgctgagataggtgcctcactgattaagcattggtaactgtcagaccaagtttactcatatatactttagattgatttaaaacttcatttttaatttaaaaggatctaggtgaagatcctttttgataatctcatgaccaaaatcccttaacgtgagttttcgttccactgagcgtcagaccccgtagaaaagatcaaaggatcttcttgagatcctttttttctgcgcgtaatctgctgcttgcaaacaaaaaaaccaccgctaccagcggtggtttgtttgccggatcaagagctaccaactctttttccgaaggtaactggcttcagcagagcgcagataccaaatactgttcttctagtgtagccgtagttaggccaccacttcaagaactctgtagcaccgcctacatacctcgctctgctaatcctgttaccagtggctgctgccagtggcgataagtcgtgtcttaccgggttggactcaagacgatagttaccggataaggcgcagcggtcgggctgaacggggggttcgtgcacacagcccagcttggagcgaacgacctacaccgaactgagatacctacagcgtgagctatgagaaagcgccacgcttcccgaagggagaaaggcggacaggtatccggtaagcggcagggtcggaacaggagagcgcacgagggagcttccagggggaaacgcctggtatctttatagtcctgtcgggtttcgccacctctgacttgagcgtcgatttttgtgatgctcgtcaggggggcggagcctatggaaaaacgccagcaacgcggcctttttacggttcctggccttttgctggccttttgctcacatgttctttcctgcgttatcccctgattctgtggataaccgtattaccgcctttgagtgagctgataccgctcgccgcagccgaacgaccgagcgcagcgagtcagtgagcgaggaagcggaagagcgcccaatacgcaaaccgcctctccccgcgcgttggccgattcattaatgcagctggcacgacaggtttcccgactggaaagcgggcagtgagcgcaacgcaattaatgtgagttagctcactcattaggcaccccaggctttacactttatgcttccggctcgtatgttgtgtggaattgtgagcggataacaatttcacacaggaaacagctatgaccatgattacgccaagcgcgcaattaaccctcactaaagggaacaaaagctggagctccaccgcggtggcggcccccgtcccaccatcgggcgcggatcatcacaagtttgtacaaaaaagcaggctctttggccatataggccaccaggtcctgcaggcgcgctcttcaggaggcgcgccaactgccctcttaattaacgaagaagatcggaccggggccgcggatctttgcaaagatccaaaaaaagcatgcgtacggattagaagccgccgagcgggtgacagccctccgaaggaagactctcctccgtgcgtcctcgtcttcaccggtcgcgttcctgaaacgcagatgtgcctcgcgccgcactgctccgaacaataaagattctacaatactagcttttatggttatgaagaggaaaattggcagtaacctggccccacaaacctcaaatgaacgaatcaaattaacaaccagatatctcgactgaaaaaaaaggtttaaaccagttccctgaaattattcccctacttgactaataagtatataaagacggtaggtattgattgtaattctgtaaatctatttcttaaacttcttgaattctacttttatagttagtcttttttttagttttaaaacaccaagaacttagtttcgaataaacacacataaataaaccatgaaatcttctcaccatcaccatcaccatcaccatcaccatggttcttctatgaaaatcgaagaaggtaaactggtaatctggattaacggcgataaaggctataacggtctcgctgaagtcggtaagaaattcgagaaagataccggaattaaagtcaccgttgagcatccggataaactggaagagaaattcccacaggttgcggcaactggcgatggccctgacattatcttctgggcacacgaccgctttggtggctacgctcaatctggcctgttggctgaaatcaccccggacaaagcgttccaggacaagctgtatccgtttacctgggatgccgtacgttacaacggcaagctgattgcttacccgatcgctgttgaagcgttatcgctgatttataacaaagatctgctgccgaacccgccaaaaacctgggaagagatcccggcgctggataaagaactgaaagcgaaaggtaagagcgcgctgatgttcaacctgcaagaaccgtacttcacctggccgctgattgctgctgacgggggttatgcgttcaagtatgaaaacggcaagtacgacattaaagacgtgggcgtggataacgctggcgcgaaagcgggtctgaccttcctggttgacctgattaaaaacaaacacatgaatgcagacaccgattactccatcgcagaagctgcctttaataaaggcgaaacagcgatgaccatcaacggcccgtgggcatggtccaacatcgacaccagcaaagtgaattatggtgtaacggtactgccgaccttcaagggtcaaccatccaaaccgttcgttggcgtgctgagcgcaggtattaacgccgccagtccgaacaaagagctggcaaaagagttcctcgaaaactatctgctgactgatgaaggtctggaagcggttaataaagacaaaccgctgggtgccgtagcgctgaagtcttacgaggaagagttggcgaaagatccacgtattgccgccactatggaaaacgcccagaaaggtgaaatcatgccgaacatcccgcagatgtccgctttctggtatgccgtgcgtactgcggtgatcaacgccgccagcggtcgtcagactgtcgatgaagccctgaaagacgcgcagactaattcgagctcgaacaacaacaacaataacaataacaacaacctcgggatcgaggaaaacctgtacttccaatccaatgcaaagagaagtagagaggatgaacccactcatcctcctactaatccatctcttgcacacggcatcattccattctgggatgagtactcacaacaagtatcggataaactttgggcatgttcaagagattcctttcatgagtttaatcagtacaacaacaagggatgcactgacggatggttcaacttttctcaattcactgtgattgaatccaagccagtgtttgatgttccactcagtgtccatcactctataacagagaatgtggcttttgataactctaaaaagccacctcagctcaagaaagcaaaaaagaatcaaaaggtggcccaaaaatttcaagcagacaaatccttgaaaatccgactctaccccaaagaacaagaaaggacaacattgaatcagtggatgggaactgctcgttggatctacaacaagtgtttagaatttacacacaacttcaaaggtgtcaagaaaaataagaagaatttccgaacggttgtggtgaacaatgataattatcagacagaaaatcagtgggttgtaaatactccttatgacgtaagagatgctgctgctattgaattgttgactgcgtttaaaacaaactttgaaaagaagaaagctggaacaattgacaagttcatgatccgtttaaggcgaaagaaagacagaaaagatcatttcgttctacattgcaagcactggaagaaaaagaatggactgtattcttttataaggaacatcaagagtgccgaacctttgcttgaggagcttcagtacgattccatcattattaagaacaagttgaaccgttattatttatgtattccacaagtactggaaattaggggtgagaaccaagcccctcaacattcaggacaagttgtagcgttggatccaggagtaagaacatttcagaccacctttgatttgaatggttattcaaccaaatggggctcaggaggtgccgaaagaattggtagattgtgttgcgcgtatgataagttacaatcgaagtggtctcaaccagaagtcagacattgcaaaagatacaagtacaagagagcaggaagaagaattcaacaaaagattagaaatattgtggatgatctacacaagaaactgtgtttgtggttgtgtcgaaactaccaagtgatcttacttccttcgtttgagactcagaaaatggtaaagaaactccataggagaattaatagcaagacagcaagaaaaatgttgacttggtcacattacagattcaagcaaagattgcttcacaaagctagagagcatccgtggacacacatttatattgtcaacgaagcgtacacatccaaaacttgctcatgttgtggacatgtttatacggttggattatctgaagtgtttcgttgtccatcatgtggctcaatttttgacagagatatcaatggagcaagaaatattcttcttcgattccttactactcatagaattagcttttgagcaccttgtgtgttgggtcttccccaccttgtgtgcgttgggtcctttcccctggctttcactctttgagtgtttgcttgcaagatcagcactttgttcgatttgtttgttttgttcaaaatgttgatttaaataaaggcgtattggaacattgaatatatatacacctattaatccacaagtgaactactgctgaccgtatctgttgaatcatctccaagatccaacgatgtactagaggtagtagtttcatcattttccttagcaatttcgagtaagaatctttgaaatgtatctctatataacatatttctcacaacaacttgcaacttgtcaaacagatccacttgaccataaccattcttgatctgcttaagtcgactttgttcccactgtacttttagctcgtacaaaatacaatatacttttcatttctccgtaaacaacatgttttcccatgtaatatccttttctatttttcgttccgttaccaactttacacatactttatatagctattcacttctatacactaaaaaactaagacaattttaattttgctgcctgccatatttcaatttgttataaattcctataatttatcctattagtagctaaaaaaagatgaatgtgaatcgaatcctaagagaattcccctcgaagatcgatctggcggcccggccggccgcggccgcactcgagatatctagacccagctttcttgtacaaagtggtgatagcttgtcgagaagtactcgagggggggcccggtacccaattcgccctatagtgagtcgtattacgcgcgctcactggccgtcgttttacaacgtcgtgactgggaaaaccctggcgttacccaacttaatcgccttgcagcacatccccctttcgccagctggcgtaatagcgaagaggcccgcaccgatcgcccttcccaacagttgcgcagcctgaatggcgaatggacgcgccctgtagcggcgcattaagcgcggcgggtgtggtggttacgcgcagcgtgaccgctacacttgccagcgccctagcgcccgctcctttcgctttcttcccttcctttctcgccacgttcgccggctttccccgtcaagctctaaatcgggggctccctttagggttccgatttagtgctttacggcacctcgaccccaaaaaacttgattagggtgatggttcacgtagtgggccatcgccctgatagacggtttttcgccctttgacgttggagtccacgttctttaatagtggactcttgttccaaactggaacaacactcaaccctatctcggtctattcttttgatttataagggattttgccgatttcggcctattggttaaaaaatgagctgatttaacaaaaatttaacgcgaattttaacaaaatattaacgcttacaatttcctgatgcggtattttctccttacgcatctgtgcggtatttcacaccgcatagggtaataactgatataattaaattgaagctctaatttgtgagtttagtatacatgcatttacttataatacagttttttagttttgctggccgcatcttctcaaatatgcttcccagcctgcttttctgtaacgttcaccctctaccttagcatcccttccctttgcaaatagtcctcttccaacaataataatgtcagatcctgtagagaccacatcatccacggttctatactgttgacccaatgcgtctcccttgtcatctaaacccacaccgggtgtcataatcaaccaatcgtaaccttcatctcttccacccatgtctctttgagcaataaagccgataacaaaatctttgtcgctcttcgcaatgtcaacagtacccttagtatattctccagtagatagggagcccttgcatgacaattctgctaacatcaaaaggcctctaggttcctttgttacttcttctgccgcctgcttcaaaccgctaacaatacctgggcccaccacaccgtgtgcattcgtaatgtctgcccattctgctattctgtatacacccgcagagtactgcaatttgactgtattaccaatgtcagcaaattttctgtcttcgaagagtaaaaaattgtacttggcggataatgcctttagcggcttaactgtgccctccatggaaaaatcagtcaagatatccacatgtgtttttagtaaacaaattttgggacctaatgcttcaactaactccagtaattccttggtggtacgaacatccaatgaagcacacaagtttgtttgcttttcgtgcatgatattaaatagcttggcagcaacaggactaggatgagtagcagcacgttccttatatgtagctttcgacatgatttatcttcgtttcctgcaggtttttgttctgtgcagttgggttaagaatactgggcaatttcatgtttcttcaacactacatatgcgtatatataccaatctaagtctgtgctccttccttcgttcttccttctgttcggagattaccgaatcaaaaaaatttcaaggaaaccgaaatcaaaaaaaagaataaaaaaaaaatgatgaattgaaaaggtggtatggtgcactctcagtacaatctgctctgatgccgcatagttaagccagccccgacacccgccaacacccgctgacgcgccctgacgggcttgtctgctcccggcatccgcttacagacaagctgtgaccgtctccgggagctgcatgtgtcagaggttttcaccgtcatcaccgaaacgcgcga

SEQ ID NO: 3915 - RNA, 9617 nt, Saccharomyces cerevisiae
  source 1..9617: mol_type = other RNA
gacgaaagggcctcgtgatacgcctatttttataggttaatgtcatgataataatggtttcttagtatgatccaatatcaaaggaaatgatagcattgaaggatgagactaatccaattgaggagtggcagcatatagaacagctaaagggtagtgctgaaggaagcatacgataccccgcatggaatgggataatatcacaggaggtactagactacctttcatcctacataaatagacgcatataagtacgcatttaagcataaacacgcactatgccgttcttctcatgtatatatatatacaggcaacacgcagatataggtgcgacgtgaacagtgagctgtatgtgcgcagctcgcgttgcattttcggaagcgctcgttttcggaaacgctttgaagttcctattccgaagttcctattctctagaaagtataggaacttcagagcgcttttgaaaaccaaaagcgctctgaagacgcactttcaaaaaaccaaaaacgcaccggactgtaacgagctactaaaatattgcgaataccgcttccacaaacattgctcaaaagtatctctttgctatatatctctgtgctatatccctatataacctacccatccacctttcgctccttgaacttgcatctaaactcgacctctacattttttatgtttatctctagtattactctttagacaaaaaaattgtagtaagaactattcatagagtgaatcgaaaacaatacgaaaatgtaaacatttcctatacgtagtatatagagacaaaatagaagaaaccgttcataattttctgaccaatgaagaatcatcaacgctatcactttctgttcacaaagtatgcgcaatccacatcggtatagaatataatcggggatgcctttatcttgaaaaaatgcacccgcagcttcgctagtaatcagtaaacgcgggaagtggagtcaggctttttttatggaagagaaaatagacaccaaagtagccttcttctaaccttaacggacctacagtgcaaaaagttatcaagagactgcattatagagcgcacaaaggagaaaaaaagtaatctaagatgctttgttagaaaaatagcgctctcgggatgcatttttgtagaacaaaaaagaagtatagattctttgttggtaaaatagcgctctcgcgttgcatttctgttctgtaaaaatgcagctcagattctttgtttgaaaaattagcgctctcgcgttgcatttttgttttacaaaaatgaagcacagattcttcgttggtaaaatagcgctttcgcgttgcatttctgttctgtaaaaatgcagctcagattctttgtttgaaaaattagcgctctcgcgttgcatttttgttctacaaaatgaagcacagatgcttcgttcaggtggcacttttcggggaaatgtgcgcggaacccctatttgtttatttttctaaatacattcaaatatgtatccgctcatgagacaataaccctgataaatgcttcaataatattgaaaaaggaagagtatgagtattcaacatttccgtgtcgcccttattcccttttttgcggcattttgccttcctgtttttgctcacccagaaacgctggtgaaagtaaaagatgctgaagatcagttgggtgcacgagtgggttacatcgaactggatctcaacagcggtaagatccttgagagttttcgccccgaagaacgttttccaatgatgagcacttttaaagttctgctatgtggcgcggtattatcccgtattgacgccgggcaagagcaactcggtcgccgcatacactattctcagaatgacttggttgagtactcaccagtcacagaaaagcatcttacggatggcatgacagtaagagaattatgcagtgctgccataaccatgagtgataacactgcggccaacttacttctgacaacgatcggaggaccgaaggagctaaccgcttttttgcacaacatgggggatcatgtaactcgccttgatcgttgggaaccggagctgaatgaagccataccaaacgacgagcgtgacaccacgatgcctgtagcaatggcaacaacgttgcgcaaactattaactggcgaactacttactctagcttcccggcaacaattaatagactggatggaggcggataaagttgcaggaccacttctgcgctcggcccttccggctggctggtttattgctgataaatctggagccggtgagcgtgggtctcgcggtatcattgcagcactggggccagatggtaagccctcccgtatcgtagttatctacacgacggggagtcaggcaactatggatgaacgaaatagacagatcgctgagataggtgcctcactgattaagcattggtaactgtcagaccaagtttactcatatatactttagattgatttaaaacttcatttttaatttaaaaggatctaggtgaagatcctttttgataatctcatgaccaaaatcccttaacgtgagttttcgttccactgagcgtcagaccccgtagaaaagatcaaaggatcttcttgagatcctttttttctgcgcgtaatctgctgcttgcaaacaaaaaaaccaccgctaccagcggtggtttgtttgccggatcaagagctaccaactctttttccgaaggtaactggcttcagcagagcgcagataccaaatactgttcttctagtgtagccgtagttaggccaccacttcaagaactctgtagcaccgcctacatacctcgctctgctaatcctgttaccagtggctgctgccagtggcgataagtcgtgtcttaccgggttggactcaagacgatagttaccggataaggcgcagcggtcgggctgaacggggggttcgtgcacacagcccagcttggagcgaacgacctacaccgaactgagatacctacagcgtgagctatgagaaagcgccacgcttcccgaagggagaaaggcggacaggtatccggtaagcggcagggtcggaacaggagagcgcacgagggagcttccagggggaaacgcctggtatctttatagtcctgtcgggtttcgccacctctgacttgagcgtcgatttttgtgatgctcgtcaggggggcggagcctatggaaaaacgccagcaacgcggcctttttacggttcctggccttttgctggccttttgctcacatgttctttcctgcgttatcccctgattctgtggataaccgtattaccgcctttgagtgagctgataccgctcgccgcagccgaacgaccgagcgcagcgagtcagtgagcgaggaagcggaagagcgcccaatacgcaaaccgcctctccccgcgcgttggccgattcattaatgcagctggcacgacaggtttcccgactggaaagcgggcagtgagcgcaacgcaattaatgtgagttagctcactcattaggcaccccaggctttacactttatgcttccggctcgtatgttgtgtggaattgtgagcggataacaatttcacacaggaaacagctatgaccatgattacgccaagcgcgcaattaaccctcactaaagggaacaaaagctggagctccaccgcggtggcggcccccgtcccaccatcgggcgcggatcatcacaagtttgtacaaaaaagcaggctctttggccatataggccaccaggtcctgcaggcgcgctcttcaggaggcgcgccaactgccctcttaattaacgaagaagatcggaccggggccgcggatctttgcaaagatccaaaaaaagcatgcgtacggattagaagccgccgagcgggtgacagccctccgaaggaagactctcctccgtgcgtcctcgtcttcaccggtcgcgttcctgaaacgcagatgtgcctcgcgccgcactgctccgaacaataaagattctacaatactagcttttatggttatgaagaggaaaattggcagtaacctggccccacaaacctcaaatgaacgaatcaaattaacaaccagatatctcgactgaaaaaaaaggtttaaaccagttccctgaaattattcccctacttgactaataagtatataaagacggtaggtattgattgtaattctgtaaatctatttcttaaacttcttgaattctacttttatagttagtcttttttttagttttaaaacaccaagaacttagtttcgaataaacacacataaataaaccatgaaatcttctcaccatcaccatcaccatcaccatcaccatggttcttctatgaaaatcgaagaaggtaaactggtaatctggattaacggcgataaaggctataacggtctcgctgaagtcggtaagaaattcgagaaagataccggaattaaagtcaccgttgagcatccggataaactggaagagaaattcccacaggttgcggcaactggcgatggccctgacattatcttctgggcacacgaccgctttggtggctacgctcaatctggcctgttggctgaaatcaccccggacaaagcgttccaggacaagctgtatccgtttacctgggatgccgtacgttacaacggcaagctgattgcttacccgatcgctgttgaagcgttatcgctgatttataacaaagatctgctgccgaacccgccaaaaacctgggaagagatcccggcgctggataaagaactgaaagcgaaaggtaagagcgcgctgatgttcaacctgcaagaaccgtacttcacctggccgctgattgctgctgacgggggttatgcgttcaagtatgaaaacggcaagtacgacattaaagacgtgggcgtggataacgctggcgcgaaagcgggtctgaccttcctggttgacctgattaaaaacaaacacatgaatgcagacaccgattactccatcgcagaagctgcctttaataaaggcgaaacagcgatgaccatcaacggcccgtgggcatggtccaacatcgacaccagcaaagtgaattatggtgtaacggtactgccgaccttcaagggtcaaccatccaaaccgttcgttggcgtgctgagcgcaggtattaacgccgccagtccgaacaaagagctggcaaaagagttcctcgaaaactatctgctgactgatgaaggtctggaagcggttaataaagacaaaccgctgggtgccgtagcgctgaagtcttacgaggaagagttggcgaaagatccacgtattgccgccactatggaaaacgcccagaaaggtgaaatcatgccgaacatcccgcagatgtccgctttctggtatgccgtgcgtactgcggtgatcaacgccgccagcggtcgtcagactgtcgatgaagccctgaaagacgcgcagactaattcgagctcgaacaacaacaacaataacaataacaacaacctcgggatcgaggaaaacctgtacttccaatccaatgcaaagagaagtagagaggatgagcccactcatcctcctactaatccatctcttgcacacggcatcattccattctgggatgagtactcacaacaagtatcggataaactttgggcatgttcaagagattcctttcatgagtttaatcagtacaacaacaagggatgcacagacggatggttcaacttttctcaattcactgtgattgaatccaagccagtgtttgatgttccactcaatgtccatcactctataacagagaatgtggcttttgataactctaaaaagccacctcagctcaagaaagcaaaaaagaatcaaaaggtggcccaaaaatttcaagcagacaaatccttgaaaatccgactctaccccaatgaacaagaaaggacaacattgaatcagtggatgggaactgctcgttggatctataacaagtgtttagaattcactaacaaatccaaaggtgtcaagaaaaataagaagaatttcagaacgtttgtggtgaacaacgataattatcagacagaaaatcagtgggttgtgaatactccttatgacgtaagagatgctgccgctattgaattgttgactgcgttcaacactaattttgaaaagaagaaggctggaacgattgacaagttcatgatccgttttaggcgaaagaaagacagaaaagatcatttcgttctacattgcaagcactggaagaaaaagagtggactgtattcttttataaggaacatcaagagttccgaacctttgcctgaggagcttcagtacgattccatcattattaagaacaagttgaaccattattatttatgtattccacaagtactggatattaggggtgagaaccaagcccctcaacattcaggacaagttgtagcattggatccaggagtaagaacatttcagaccacctttgatttgaatggttattcaaccaaatggggctcaggaggtgccgaaagaattggtagattgtgttgcgcgtatgacaagttacaatcgaagtggtctcaaccagaagtcagacattgcaaaagatacaagtacaagagagcaggaagaagaattcaacaaaagattagaaatattgtggatgatttacacaagaaactgtgtttgtggttgtgtcgaaactaccaagtgattttacttccttcgtttgagactcagaaaatggtaaagaaactccacaggagaattaatagcaagacagcaagaaaaatgttgacttggtcacattacagattcaagcaaagattgcttcacaaagctagagagcatccgtggacacacatttatattgtcaacgaagcgtatacatccaaaacttgctcatgttgtggacatatttatacggttggatcatccgaagtgtttcgttgtccatcatgtggctcaatttttgacagagatatcaatgcagcaagaaatattcttcttcgattccttactactcatagaattagtttttgagcaccttgtgtgcgttgggtcctttcccctggctttcactctttgagtgtttgcttgcaagatcagcactttgttcgatttgtttgttttgttcaaattgttgatttaaataaaggcgttaacaattaaatatttaacatgaatacctagatctggatcatgaatactcttgtttataattttattcatgtgaagcacgtgtcgttggcatgagagaggaaactttgctcttgtcctttcttttggtctttttgagcttaagtcgactttgttcccactgtacttttagctcgtacaaaatacaatatacttttcatttctccgtaaacaacatgttttcccatgtaatatccttttctatttttcgttccgttaccaactttacacatactttatatagctattcacttctatacactaaaaaactaagacaattttaattttgctgcctgccatatttcaatttgttataaattcctataatttatcctattagtagctaaaaaaagatgaatgtgaatcgaatcctaagagaattcccctcgaagatcgatctggcggcccggccggccgcggccgcactcgagatatctagacccagctttcttgtacaaagtggtgatagcttgtcgagaagtactcgagggggggcccggtacccaattcgccctatagtgagtcgtattacgcgcgctcactggccgtcgttttacaacgtcgtgactgggaaaaccctggcgttacccaacttaatcgccttgcagcacatccccctttcgccagctggcgtaatagcgaagaggcccgcaccgatcgcccttcccaacagttgcgcagcctgaatggcgaatggacgcgccctgtagcggcgcattaagcgcggcgggtgtggtggttacgcgcagcgtgaccgctacacttgccagcgccctagcgcccgctcctttcgctttcttcccttcctttctcgccacgttcgccggctttccccgtcaagctctaaatcgggggctccctttagggttccgatttagtgctttacggcacctcgaccccaaaaaacttgattagggtgatggttcacgtagtgggccatcgccctgatagacggtttttcgccctttgacgttggagtccacgttctttaatagtggactcttgttccaaactggaacaacactcaaccctatctcggtctattcttttgatttataagggattttgccgatttcggcctattggttaaaaaatgagctgatttaacaaaaatttaacgcgaattttaacaaaatattaacgcttacaatttcctgatgcggtattttctccttacgcatctgtgcggtatttcacaccgcatagggtaataactgatataattaaattgaagctctaatttgtgagtttagtatacatgcatttacttataatacagttttttagttttgctggccgcatcttctcaaatatgcttcccagcctgcttttctgtaacgttcaccctctaccttagcatcccttccctttgcaaatagtcctcttccaacaataataatgtcagatcctgtagagaccacatcatccacggttctatactgttgacccaatgcgtctcccttgtcatctaaacccacaccgggtgtcataatcaaccaatcgtaaccttcatctcttccacccatgtctctttgagcaataaagccgataacaaaatctttgtcgctcttcgcaatgtcaacagtacccttagtatattctccagtagatagggagcccttgcatgacaattctgctaacatcaaaaggcctctaggttcctttgttacttcttctgccgcctgcttcaaaccgctaacaatacctgggcccaccacaccgtgtgcattcgtaatgtctgcccattctgctattctgtatacacccgcagagtactgcaatttgactgtattaccaatgtcagcaaattttctgtcttcgaagagtaaaaaattgtacttggcggataatgcctttagcggcttaactgtgccctccatggaaaaatcagtcaagatatccacatgtgtttttagtaaacaaattttgggacctaatgcttcaactaactccagtaattccttggtggtacgaacatccaatgaagcacacaagtttgtttgcttttcgtgcatgatattaaatagcttggcagcaacaggactaggatgagtagcagcacgttccttatatgtagctttcgacatgatttatcttcgtttcctgcaggtttttgttctgtgcagttgggttaagaatactgggcaatttcatgtttcttcaacactacatatgcgtatatataccaatctaagtctgtgctccttccttcgttcttccttctgttcggagattaccgaatcaaaaaaatttcaaggaaaccgaaatcaaaaaaaagaataaaaaaaaaatgatgaattgaaaaggtggtatggtgcactctcagtacaatctgctctgatgccgcatagttaagccagccccgacacccgccaacacccgctgacgcgccctgacgggcttgtctgctcccggcatccgcttacagacaagctgtgaccgtctccgggagctgcatgtgtcagaggttttcaccgtcatcaccgaaacgcgcga

SEQ ID NO: 3916 - RNA, 9995 nt, Saccharomyces cerevisiae
  source 1..9995: mol_type = other RNA
gacgaaagggcctcgtgatacgcctatttttataggttaatgtcatgataataatggtttcttagtatgatccaatatcaaaggaaatgatagcattgaaggatgagactaatccaattgaggagtggcagcatatagaacagctaaagggtagtgctgaaggaagcatacgataccccgcatggaatgggataatatcacaggaggtactagactacctttcatcctacataaatagacgcatataagtacgcatttaagcataaacacgcactatgccgttcttctcatgtatatatatatacaggcaacacgcagatataggtgcgacgtgaacagtgagctgtatgtgcgcagctcgcgttgcattttcggaagcgctcgttttcggaaacgctttgaagttcctattccgaagttcctattctctagaaagtataggaacttcagagcgcttttgaaaaccaaaagcgctctgaagacgcactttcaaaaaaccaaaaacgcaccggactgtaacgagctactaaaatattgcgaataccgcttccacaaacattgctcaaaagtatctctttgctatatatctctgtgctatatccctatataacctacccatccacctttcgctccttgaacttgcatctaaactcgacctctacattttttatgtttatctctagtattactctttagacaaaaaaattgtagtaagaactattcatagagtgaatcgaaaacaatacgaaaatgtaaacatttcctatacgtagtatatagagacaaaatagaagaaaccgttcataattttctgaccaatgaagaatcatcaacgctatcactttctgttcacaaagtatgcgcaatccacatcggtatagaatataatcggggatgcctttatcttgaaaaaatgcacccgcagcttcgctagtaatcagtaaacgcgggaagtggagtcaggctttttttatggaagagaaaatagacaccaaagtagccttcttctaaccttaacggacctacagtgcaaaaagttatcaagagactgcattatagagcgcacaaaggagaaaaaaagtaatctaagatgctttgttagaaaaatagcgctctcgggatgcatttttgtagaacaaaaaagaagtatagattctttgttggtaaaatagcgctctcgcgttgcatttctgttctgtaaaaatgcagctcagattctttgtttgaaaaattagcgctctcgcgttgcatttttgttttacaaaaatgaagcacagattcttcgttggtaaaatagcgctttcgcgttgcatttctgttctgtaaaaatgcagctcagattctttgtttgaaaaattagcgctctcgcgttgcatttttgttctacaaaatgaagcacagatgcttcgttcaggtggcacttttcggggaaatgtgcgcggaacccctatttgtttatttttctaaatacattcaaatatgtatccgctcatgagacaataaccctgataaatgcttcaataatattgaaaaaggaagagtatgagtattcaacatttccgtgtcgcccttattcccttttttgcggcattttgccttcctgtttttgctcacccagaaacgctggtgaaagtaaaagatgctgaagatcagttgggtgcacgagtgggttacatcgaactggatctcaacagcggtaagatccttgagagttttcgccccgaagaacgttttccaatgatgagcacttttaaagttctgctatgtggcgcggtattatcccgtattgacgccgggcaagagcaactcggtcgccgcatacactattctcagaatgacttggttgagtactcaccagtcacagaaaagcatcttacggatggcatgacagtaagagaattatgcagtgctgccataaccatgagtgataacactgcggccaacttacttctgacaacgatcggaggaccgaaggagctaaccgcttttttgcacaacatgggggatcatgtaactcgccttgatcgttgggaaccggagctgaatgaagccataccaaacgacgagcgtgacaccacgatgcctgtagcaatggcaacaacgttgcgcaaactattaactggcgaactacttactctagcttcccggcaacaattaatagactggatggaggcggataaagttgcaggaccacttctgcgctcggcccttccggctggctggtttattgctgataaatctggagccggtgagcgtgggtctcgcggtatcattgcagcactggggccagatggtaagccctcccgtatcgtagttatctacacgacggggagtcaggcaactatggatgaacgaaatagacagatcgctgagataggtgcctcactgattaagcattggtaactgtcagaccaagtttactcatatatactttagattgatttaaaacttcatttttaatttaaaaggatctaggtgaagatcctttttgataatctcatgaccaaaatcccttaacgtgagttttcgttccactgagcgtcagaccccgtagaaaagatcaaaggatcttcttgagatcctttttttctgcgcgtaatctgctgcttgcaaacaaaaaaaccaccgctaccagcggtggtttgtttgccggatcaagagctaccaactctttttccgaaggtaactggcttcagcagagcgcagataccaaatactgttcttctagtgtagccgtagttaggccaccacttcaagaactctgtagcaccgcctacatacctcgctctgctaatcctgttaccagtggctgctgccagtggcgataagtcgtgtcttaccgggttggactcaagacgatagttaccggataaggcgcagcggtcgggctgaacggggggttcgtgcacacagcccagcttggagcgaacgacctacaccgaactgagatacctacagcgtgagctatgagaaagcgccacgcttcccgaagggagaaaggcggacaggtatccggtaagcggcagggtcggaacaggagagcgcacgagggagcttccagggggaaacgcctggtatctttatagtcctgtcgggtttcgccacctctgacttgagcgtcgatttttgtgatgctcgtcaggggggcggagcctatggaaaaacgccagcaacgcggcctttttacggttcctggccttttgctggccttttgctcacatgttctttcctgcgttatcccctgattctgtggataaccgtattaccgcctttgagtgagctgataccgctcgccgcagccgaacgaccgagcgcagcgagtcagtgagcgaggaagcggaagagcgcccaatacgcaaaccgcctctccccgcgcgttggccgattcattaatgcagctggcacgacaggtttcccgactggaaagcgggcagtgagcgcaacgcaattaatgtgagttagctcactcattaggcaccccaggctttacactttatgcttccggctcgtatgttgtgtggaattgtgagcggataacaatttcacacaggaaacagctatgaccatgattacgccaagcgcgcaattaaccctcactaaagggaacaaaagctggagctccaccgcggtggcggcccccgtcccaccatcgggcgcggatcatcacaagtttgtacaaaaaagcaggctctttggccatataggccaccaggtcctgcaggcgcgctcttcaggaggcgcgccaactgccctcttaattaacgaagaagatcggaccggggccgcggatctttgcaaagatccaaaaaaagcatgcgtacggattagaagccgccgagcgggtgacagccctccgaaggaagactctcctccgtgcgtcctcgtcttcaccggtcgcgttcctgaaacgcagatgtgcctcgcgccgcactgctccgaacaataaagattctacaatactagcttttatggttatgaagaggaaaattggcagtaacctggccccacaaacctcaaatgaacgaatcaaattaacaaccagatatctcgactgaaaaaaaaggtttaaaccagttccctgaaattattcccctacttgactaataagtatataaagacggtaggtattgattgtaattctgtaaatctatttcttaaacttcttgaattctacttttatagttagtcttttttttagttttaaaacaccaagaacttagtttcgaataaacacacataaataaaccatgaaatcttctcaccatcaccatcaccatcaccatcaccatggttcttctatgaaaatcgaagaaggtaaactggtaatctggattaacggcgataaaggctataacggtctcgctgaagtcggtaagaaattcgagaaagataccggaattaaagtcaccgttgagcatccggataaactggaagagaaattcccacaggttgcggcaactggcgatggccctgacattatcttctgggcacacgaccgctttggtggctacgctcaatctggcctgttggctgaaatcaccccggacaaagcgttccaggacaagctgtatccgtttacctgggatgccgtacgttacaacggcaagctgattgcttacccgatcgctgttgaagcgttatcgctgatttataacaaagatctgctgccgaacccgccaaaaacctgggaagagatcccggcgctggataaagaactgaaagcgaaaggtaagagcgcgctgatgttcaacctgcaagaaccgtacttcacctggccgctgattgctgctgacgggggttatgcgttcaagtatgaaaacggcaagtacgacattaaagacgtgggcgtggataacgctggcgcgaaagcgggtctgaccttcctggttgacctgattaaaaacaaacacatgaatgcagacaccgattactccatcgcagaagctgcctttaataaaggcgaaacagcgatgaccatcaacggcccgtgggcatggtccaacatcgacaccagcaaagtgaattatggtgtaacggtactgccgaccttcaagggtcaaccatccaaaccgttcgttggcgtgctgagcgcaggtattaacgccgccagtccgaacaaagagctggcaaaagagttcctcgaaaactatctgctgactgatgaaggtctggaagcggttaataaagacaaaccgctgggtgccgtagcgctgaagtcttacgaggaagagttggcgaaagatccacgtattgccgccactatggaaaacgcccagaaaggtgaaatcatgccgaacatcccgcagatgtccgctttctggtatgccgtgcgtactgcggtgatcaacgccgccagcggtcgtcagactgtcgatgaagccctgaaagacgcgcagactaattcgagctcgaacaacaacaacaataacaataacaacaacctcgggatcgaggaaaacctgtacttccaatccaatgcaaaaccccctgacccccgtccaatagagggcaaacatatcctaaccgtcaaaaagacggctcttagaaatattgttggaaatgacccaatgatattgtctcgtattcaggatgccgtgtatcggaaacatgtcatcgtacagcacacgacccattttatgaagttgtacctgctttccttgtttgagaaaggggatgtattaccaatgatagatgttgatttcatagcgatttccatgcgtgtagtatccaatatgccccctgaagaaaatagacgaggaagaccacccaatgcttctactcgggcacttatgaaccaactagagtgcttttacaaggaacattatgagccccttcttggtaaaaatccagaagagatgagaacaacactgtaccgtattggagacatgctacagtacgaggaaaaggatatactaaagaatatcaagaacaacatctttctacattttaccgattatgtaaaggaattcatcaacaaggaattcaacctgaaagagaccctttccaaggtagatgcgatggctttgacagaagaggagaaacggctgacaaagcggagcatctccatagaactacgtcacgtaaagaacgaccttctgtcccctttaggaaccgtgcttacatctcctgttaaatatcacgaatggatatgtcagcacaagtcaaagcttatcccaaaggaaaagtacctgaagaacaacattgaatatgatgtgaaagcaaaaccaatggattatctgtctagcatgttttatgtttgttctcaattggaaaagtacgggagacacgttcatgccttcccactatgtacaagtactatcccgtcctacgcaaccattgatacaacaaccctcattatgctaatgattgatgataatgctcttatgttccgcaagaaggtaaaggaaagcaaggaagatgtttggggctctttcttccagcttgggaacaaggctttccgacgcaaggattatcggtttcattatatgataaaaactgatggggtaggtgcctctattctgttccatcgcaaagaccaaaatccagacaagctagatgatgatacgatatgtactgtaaaagagaagtatattgatgagatagaagttccacaggacaagaacattattgggattgatgttggattagatgatattctttactgtacggatggtacatccttctatcgctattctgctaaccaacgaagggtacaaacaaaaaccaagaaatacatgaatatcatggacagtctaaagaaggaacatttggtagaaggcatgagtgtgaaggagtgggaaacaatcctatcactctacaacaaatacacatgctcattttcaaaattcaaagagtatgtagaacaaaaaacaacgattacttacactcttacaccattctatactaacactttgctacgtaagctaaagtggaactgttatatcaatcgtcagcgctctgaagccaagatgttgaacaagctaaaggaacagtttggagaacccgataaggcgattgttgcgattggtgattgggaccaaggcagttatcacatgaagggaaaagaaccaaccaaagggaagggtatgcgcaaagtactacgccaaggtggttatgaagtctatcttgtagatgaattcaaaacatcttgtacgtgtcataattgtcatggtgaatgtaagaagtggctttatcgtccctcacacaaaccaagaaatctcggagagaatactctcgtccatgggctcctcagatgtacttctgtaaatgggtgtggaagcctttggaaccgtgatgtaaatggttgtctgaatatttgtatgttggctcacaaagcagtacaaaaagaagaaagaccattagcatttcagcgaggaattcatatctgttaaacgacagatacgacccaaatttttatagcgggtatatttttatgggattagacccccatttgaaatgtcactcgctgtaaatatattctttttatttttataacttttacaaaaaatcctaaatttttgtaaaatgaaaaaaagtaaaagttctatgttacaacctgctgacgattagctcaagctcatgagcaattgggtaacaaagcttaagtcgactttgttcccactgtacttttagctcgtacaaaatacaatatacttttcatttctccgtaaacaacatgttttcccatgtaatatccttttctatttttcgttccgttaccaactttacacatactttatatagctattcacttctatacactaaaaaactaagacaattttaattttgctgcctgccatatttcaatttgttataaattcctataatttatcctattagtagctaaaaaaagatgaatgtgaatcgaatcctaagagaattcccctcgaagatcgatctggcggcccggccggccgcggccgcactcgagatatctagacccagctttcttgtacaaagtggtgatagcttgtcgagaagtactcgagggggggcccggtacccaattcgccctatagtgagtcgtattacgcgcgctcactggccgtcgttttacaacgtcgtgactgggaaaaccctggcgttacccaacttaatcgccttgcagcacatccccctttcgccagctggcgtaatagcgaagaggcccgcaccgatcgcccttcccaacagttgcgcagcctgaatggcgaatggacgcgccctgtagcggcgcattaagcgcggcgggtgtggtggttacgcgcagcgtgaccgctacacttgccagcgccctagcgcccgctcctttcgctttcttcccttcctttctcgccacgttcgccggctttccccgtcaagctctaaatcgggggctccctttagggttccgatttagtgctttacggcacctcgaccccaaaaaacttgattagggtgatggttcacgtagtgggccatcgccctgatagacggtttttcgccctttgacgttggagtccacgttctttaatagtggactcttgttccaaactggaacaacactcaaccctatctcggtctattcttttgatttataagggattttgccgatttcggcctattggttaaaaaatgagctgatttaacaaaaatttaacgcgaattttaacaaaatattaacgcttacaatttcctgatgcggtattttctccttacgcatctgtgcggtatttcacaccgcatagggtaataactgatataattaaattgaagctctaatttgtgagtttagtatacatgcatttacttataatacagttttttagttttgctggccgcatcttctcaaatatgcttcccagcctgcttttctgtaacgttcaccctctaccttagcatcccttccctttgcaaatagtcctcttccaacaataataatgtcagatcctgtagagaccacatcatccacggttctatactgttgacccaatgcgtctcccttgtcatctaaacccacaccgggtgtcataatcaaccaatcgtaaccttcatctcttccacccatgtctctttgagcaataaagccgataacaaaatctttgtcgctcttcgcaatgtcaacagtacccttagtatattctccagtagatagggagcccttgcatgacaattctgctaacatcaaaaggcctctaggttcctttgttacttcttctgccgcctgcttcaaaccgctaacaatacctgggcccaccacaccgtgtgcattcgtaatgtctgcccattctgctattctgtatacacccgcagagtactgcaatttgactgtattaccaatgtcagcaaattttctgtcttcgaagagtaaaaaattgtacttggcggataatgcctttagcggcttaactgtgccctccatggaaaaatcagtcaagatatccacatgtgtttttagtaaacaaattttgggacctaatgcttcaactaactccagtaattccttggtggtacgaacatccaatgaagcacacaagtttgtttgcttttcgtgcatgatattaaatagcttggcagcaacaggactaggatgagtagcagcacgttccttatatgtagctttcgacatgatttatcttcgtttcctgcaggtttttgttctgtgcagttgggttaagaatactgggcaatttcatgtttcttcaacactacatatgcgtatatataccaatctaagtctgtgctccttccttcgttcttccttctgttcggagattaccgaatcaaaaaaatttcaaggaaaccgaaatcaaaaaaaagaataaaaaaaaaatgatgaattgaaaaggtggtatggtgcactctcagtacaatctgctctgatgccgcatagttaagccagccccgacacccgccaacacccgctgacgcgccctgacgggcttgtctgctcccggcatccgcttacagacaagctgtgaccgtctccgggagctgcatgtgtcagaggttttcaccgtcatcaccgaaacgcgcga

SEQ ID NO: 3917 - RNA, 10724 nt, Saccharomyces cerevisiae
  source 1..10724: mol_type = other RNA
gacgaaagggcctcgtgatacgcctatttttataggttaatgtcatgataataatggtttcttagtatgatccaatatcaaaggaaatgatagcattgaaggatgagactaatccaattgaggagtggcagcatatagaacagctaaagggtagtgctgaaggaagcatacgataccccgcatggaatgggataatatcacaggaggtactagactacctttcatcctacataaatagacgcatataagtacgcatttaagcataaacacgcactatgccgttcttctcatgtatatatatatacaggcaacacgcagatataggtgcgacgtgaacagtgagctgtatgtgcgcagctcgcgttgcattttcggaagcgctcgttttcggaaacgctttgaagttcctattccgaagttcctattctctagaaagtataggaacttcagagcgcttttgaaaaccaaaagcgctctgaagacgcactttcaaaaaaccaaaaacgcaccggactgtaacgagctactaaaatattgcgaataccgcttccacaaacattgctcaaaagtatctctttgctatatatctctgtgctatatccctatataacctacccatccacctttcgctccttgaacttgcatctaaactcgacctctacattttttatgtttatctctagtattactctttagacaaaaaaattgtagtaagaactattcatagagtgaatcgaaaacaatacgaaaatgtaaacatttcctatacgtagtatatagagacaaaatagaagaaaccgttcataattttctgaccaatgaagaatcatcaacgctatcactttctgttcacaaagtatgcgcaatccacatcggtatagaatataatcggggatgcctttatcttgaaaaaatgcacccgcagcttcgctagtaatcagtaaacgcgggaagtggagtcaggctttttttatggaagagaaaatagacaccaaagtagccttcttctaaccttaacggacctacagtgcaaaaagttatcaagagactgcattatagagcgcacaaaggagaaaaaaagtaatctaagatgctttgttagaaaaatagcgctctcgggatgcatttttgtagaacaaaaaagaagtatagattctttgttggtaaaatagcgctctcgcgttgcatttctgttctgtaaaaatgcagctcagattctttgtttgaaaaattagcgctctcgcgttgcatttttgttttacaaaaatgaagcacagattcttcgttggtaaaatagcgctttcgcgttgcatttctgttctgtaaaaatgcagctcagattctttgtttgaaaaattagcgctctcgcgttgcatttttgttctacaaaatgaagcacagatgcttcgttcaggtggcacttttcggggaaatgtgcgcggaacccctatttgtttatttttctaaatacattcaaatatgtatccgctcatgagacaataaccctgataaatgcttcaataatattgaaaaaggaagagtatgagtattcaacatttccgtgtcgcccttattcccttttttgcggcattttgccttcctgtttttgctcacccagaaacgctggtgaaagtaaaagatgctgaagatcagttgggtgcacgagtgggttacatcgaactggatctcaacagcggtaagatccttgagagttttcgccccgaagaacgttttccaatgatgagcacttttaaagttctgctatgtggcgcggtattatcccgtattgacgccgggcaagagcaactcggtcgccgcatacactattctcagaatgacttggttgagtactcaccagtcacagaaaagcatcttacggatggcatgacagtaagagaattatgcagtgctgccataaccatgagtgataacactgcggccaacttacttctgacaacgatcggaggaccgaaggagctaaccgcttttttgcacaacatgggggatcatgtaactcgccttgatcgttgggaaccggagctgaatgaagccataccaaacgacgagcgtgacaccacgatgcctgtagcaatggcaacaacgttgcgcaaactattaactggcgaactacttactctagcttcccggcaacaattaatagactggatggaggcggataaagttgcaggaccacttctgcgctcggcccttccggctggctggtttattgctgataaatctggagccggtgagcgtgggtctcgcggtatcattgcagcactggggccagatggtaagccctcccgtatcgtagttatctacacgacggggagtcaggcaactatggatgaacgaaatagacagatcgctgagataggtgcctcactgattaagcattggtaactgtcagaccaagtttactcatatatactttagattgatttaaaacttcatttttaatttaaaaggatctaggtgaagatcctttttgataatctcatgaccaaaatcccttaacgtgagttttcgttccactgagcgtcagaccccgtagaaaagatcaaaggatcttcttgagatcctttttttctgcgcgtaatctgctgcttgcaaacaaaaaaaccaccgctaccagcggtggtttgtttgccggatcaagagctaccaactctttttccgaaggtaactggcttcagcagagcgcagataccaaatactgttcttctagtgtagccgtagttaggccaccacttcaagaactctgtagcaccgcctacatacctcgctctgctaatcctgttaccagtggctgctgccagtggcgataagtcgtgtcttaccgggttggactcaagacgatagttaccggataaggcgcagcggtcgggctgaacggggggttcgtgcacacagcccagcttggagcgaacgacctacaccgaactgagatacctacagcgtgagctatgagaaagcgccacgcttcccgaagggagaaaggcggacaggtatccggtaagcggcagggtcggaacaggagagcgcacgagggagcttccagggggaaacgcctggtatctttatagtcctgtcgggtttcgccacctctgacttgagcgtcgatttttgtgatgctcgtcaggggggcggagcctatggaaaaacgccagcaacgcggcctttttacggttcctggccttttgctggccttttgctcacatgttctttcctgcgttatcccctgattctgtggataaccgtattaccgcctttgagtgagctgataccgctcgccgcagccgaacgaccgagcgcagcgagtcagtgagcgaggaagcggaagagcgcccaatacgcaaaccgcctctccccgcgcgttggccgattcattaatgcagctggcacgacaggtttcccgactggaaagcgggcagtgagcgcaacgcaattaatgtgagttagctcactcattaggcaccccaggctttacactttatgcttccggctcgtatgttgtgtggaattgtgagcggataacaatttcacacaggaaacagctatgaccatgattacgccaagcgcgcaattaaccctcactaaagggaacaaaagctggagctccaccgcggtggcggcccccgtcccaccatcgggcgcggatcatcacaagtttgtacaaaaaagcaggctctttggccatataggccaccaggtcctgcaggcgcgctcttcaggaggcgcgccaactgccctcttaattaacgaagaagatcggaccggggccgcggatctttgcaaagatccaaaaaaagcatgcgtacggattagaagccgccgagcgggtgacagccctccgaaggaagactctcctccgtgcgtcctcgtcttcaccggtcgcgttcctgaaacgcagatgtgcctcgcgccgcactgctccgaacaataaagattctacaatactagcttttatggttatgaagaggaaaattggcagtaacctggccccacaaacctcaaatgaacgaatcaaattaacaaccagatatctcgactgaaaaaaaaggtttaaaccagttccctgaaattattcccctacttgactaataagtatataaagacggtaggtattgattgtaattctgtaaatctatttcttaaacttcttgaattctacttttatagttagtcttttttttagttttaaaacaccaagaacttagtttcgaataaacacacataaataaaccatgaaatcttctcaccatcaccatcaccatcaccatcaccatggttcttctatgaaaatcgaagaaggtaaactggtaatctggattaacggcgataaaggctataacggtctcgctgaagtcggtaagaaattcgagaaagataccggaattaaagtcaccgttgagcatccggataaactggaagagaaattcccacaggttgcggcaactggcgatggccctgacattatcttctgggcacacgaccgctttggtggctacgctcaatctggcctgttggctgaaatcaccccggacaaagcgttccaggacaagctgtatccgtttacctgggatgccgtacgttacaacggcaagctgattgcttacccgatcgctgttgaagcgttatcgctgatttataacaaagatctgctgccgaacccgccaaaaacctgggaagagatcccggcgctggataaagaactgaaagcgaaaggtaagagcgcgctgatgttcaacctgcaagaaccgtacttcacctggccgctgattgctgctgacgggggttatgcgttcaagtatgaaaacggcaagtacgacattaaagacgtgggcgtggataacgctggcgcgaaagcgggtctgaccttcctggttgacctgattaaaaacaaacacatgaatgcagacaccgattactccatcgcagaagctgcctttaataaaggcgaaacagcgatgaccatcaacggcccgtgggcatggtccaacatcgacaccagcaaagtgaattatggtgtaacggtactgccgaccttcaagggtcaaccatccaaaccgttcgttggcgtgctgagcgcaggtattaacgccgccagtccgaacaaagagctggcaaaagagttcctcgaaaactatctgctgactgatgaaggtctggaagcggttaataaagacaaaccgctgggtgccgtagcgctgaagtcttacgaggaagagttggcgaaagatccacgtattgccgccactatggaaaacgcccagaaaggtgaaatcatgccgaacatcccgcagatgtccgctttctggtatgccgtgcgtactgcggtgatcaacgccgccagcggtcgtcagactgtcgatgaagccctgaaagacgcgcagactaattcgagctcgaacaacaacaacaataacaataacaacaacctcgggatcgaggaaaacctgtacttccaatccaatgcagttaaacttaaagaacgtatatctcaccttactgatgatatgagaaagaaaggttgttctgttgaagagatcaaacttgctattaaaagtgatatcacaggccctgttacacaacttaaactagccatttcgtcaaaaaatataaatcaaattccaaaggattttttagaccaaaaagctatacaacatgttaacaactttatctcatcttacccaaagaattacaaattcaaaaagggttctatttactatgatgcaatagcaaacccggtaaaacacctgaaagcttattttaagctagcagaaatatgcgaatcgtacaaatttaaattattccaatgtctccctttgagaaatacatttataccatcatatatgactatagatactatgatcttaaataatcagatcttaaaagactcaaaaagaagcaaattagataaatcatctatatggggaaaagttatcaatatatctaacgaagctttaaaagaccaaggtccaaataaatcaataaagtttagagggacaatgataacggatggtgtaggagtatcaatagtgaagcagaactttgaaacctcaaaaagtagtacaagtggtcctaaaaacaatgttgtaaaagaagattttcagtacataaaagaaatttctaaagaagaactgctcgctacaaaaggaaaaactgtgcttattgatcctggtcgccgagaccttttatattgtatgcacgaagatagtacggctaagaaaaagaaattgtaccgctatacgagaaatcaaaaggctaaagaactaaaatcggcaaaatttagaaagcttcgtcaacggtttaaaccaacaagtattcaagagtgtgaaaataaattaagtcaatactcttggtcaactgttcatactgatgcttatctcgaatatttaaaagttagatctcaagtttctcctttgctggaagagtattatggcaatgaagatgttgaaaaaaatcagaggcaagataatttgattcctttcataaagatgaaactttcatcatatatcaatcagatacaagcagacaaacgactgtcaaaaaatcttaggaaaaagtttggaaatgattgtatccttattttaggaaattggtctgcctgtcatatgaagtttcaagaacaaattcgagggaaaggaatgagaaaaatgttaagaaaagaagggtttcagatttatctacttgatgaatacaaaacctcgagtatctgcccatcttgcgaacaccaacttgaaaattttaaagaatgtattaacccaaggccatatcgacgttcaaataatcctactgtaaagtgccatggacttttaaggtaaaaactgtatattactattatatgaatcaaaaagcttatatataacccgcgttaatgttttagatgcaaaaatcaaaaatgtttagatccaaaggtgcttacagaagaggatacaaactttagattatggaatagagacttggctgccgtcctgaatttcagaaaaattttaattagtttaagggaatcagcacgaagacctgaagttttttcgagaggagagaagagaaaaaaaacttgaatcccctcacagttggaaaaaaaacacgtctccagtaattttctgcccttgttatcgctttggtaaacgttagataggtaagaaattagtaatttgtaccacctactttattaggtactaacatcgttccattaaccaacaggttctctaattacatcctctttgaaagagactcccatatttaaacaacctggaaatggcctctaaaacaagcatattgatataccacagtttttaaaaaagcccatatacgaaatcgcccctaattttagcagttataataaataatggtttttaatttattgagaaacgagaaaagctttttggacccaagttgaataatacgaaatagttttattaaatatatgtttaataaaaaaaactaaaaacgtgcttttttcgcttttcgtttttgggggtcaagctcttgttttttggccaaaaatcacgaatgttttgcgattactctgggtctatggaaataataaagtactcgtttagacgcttttaattgcaaaatggatatcaaatcactgtttaaaaataacaaaaaagtactttatttccgcgacgtgattttatcactctattttattttcgtgattacattaattctatttttctatgataataattatccattatagcaaaaattaacgatctttagtagccctttttgtttgtttatgaatgaaagtgttacaaccaacactgagctttgaaaaaaatgacattttaaggtccgctcaaccaaaacgttaagttctttaaacattaattactcgctcagtatttttaataaaaatatgatttctaatgcattagaatcgcttgaaagagtaattcattatcatcaaaagaaaaacaatgtaaaccaggagcaatctcgaaaaataaaaggggcgggcccccaaaaatgatcaataaaaaaagtagaaaaatatagaacaacaagctgtcaatgttcggtattaaagacattttcctaatagttaatttatgttacataactcgagcaaaagaattgtttcctaatttttaattatacataaaaaaacaccttaaactatcatgcaaaaaatgaagtgctttgaagggatgatagacaaacaacaatgcattataacaatttaaatatttattgagtttgtctaagttttggtttaaaaaaatatgtcctatatctttttatgaaagagttcaaacataagaaatattctaaaattttgcagccgacaattagaataaaatatttgagaagcttaagtcgactttgttcccactgtacttttagctcgtacaaaatacaatatacttttcatttctccgtaaacaacatgttttcccatgtaatatccttttctatttttcgttccgttaccaactttacacatactttatatagctattcacttctatacactaaaaaactaagacaattttaattttgctgcctgccatatttcaatttgttataaattcctataatttatcctattagtagctaaaaaaagatgaatgtgaatcgaatcctaagagaattcccctcgaagatcgatctggcggcccggccggccgcggccgcactcgagatatctagacccagctttcttgtacaaagtggtgatagcttgtcgagaagtactcgagggggggcccggtacccaattcgccctatagtgagtcgtattacgcgcgctcactggccgtcgttttacaacgtcgtgactgggaaaaccctggcgttacccaacttaatcgccttgcagcacatccccctttcgccagctggcgtaatagcgaagaggcccgcaccgatcgcccttcccaacagttgcgcagcctgaatggcgaatggacgcgccctgtagcggcgcattaagcgcggcgggtgtggtggttacgcgcagcgtgaccgctacacttgccagcgccctagcgcccgctcctttcgctttcttcccttcctttctcgccacgttcgccggctttccccgtcaagctctaaatcgggggctccctttagggttccgatttagtgctttacggcacctcgaccccaaaaaacttgattagggtgatggttcacgtagtgggccatcgccctgatagacggtttttcgccctttgacgttggagtccacgttctttaatagtggactcttgttccaaactggaacaacactcaaccctatctcggtctattcttttgatttataagggattttgccgatttcggcctattggttaaaaaatgagctgatttaacaaaaatttaacgcgaattttaacaaaatattaacgcttacaatttcctgatgcggtattttctccttacgcatctgtgcggtatttcacaccgcatagggtaataactgatataattaaattgaagctctaatttgtgagtttagtatacatgcatttacttataatacagttttttagttttgctggccgcatcttctcaaatatgcttcccagcctgcttttctgtaacgttcaccctctaccttagcatcccttccctttgcaaatagtcctcttccaacaataataatgtcagatcctgtagagaccacatcatccacggttctatactgttgacccaatgcgtctcccttgtcatctaaacccacaccgggtgtcataatcaaccaatcgtaaccttcatctcttccacccatgtctctttgagcaataaagccgataacaaaatctttgtcgctcttcgcaatgtcaacagtacccttagtatattctccagtagatagggagcccttgcatgacaattctgctaacatcaaaaggcctctaggttcctttgttacttcttctgccgcctgcttcaaaccgctaacaatacctgggcccaccacaccgtgtgcattcgtaatgtctgcccattctgctattctgtatacacccgcagagtactgcaatttgactgtattaccaatgtcagcaaattttctgtcttcgaagagtaaaaaattgtacttggcggataatgcctttagcggcttaactgtgccctccatggaaaaatcagtcaagatatccacatgtgtttttagtaaacaaattttgggacctaatgcttcaactaactccagtaattccttggtggtacgaacatccaatgaagcacacaagtttgtttgcttttcgtgcatgatattaaatagcttggcagcaacaggactaggatgagtagcagcacgttccttatatgtagctttcgacatgatttatcttcgtttcctgcaggtttttgttctgtgcagttgggttaagaatactgggcaatttcatgtttcttcaacactacatatgcgtatatataccaatctaagtctgtgctccttccttcgttcttccttctgttcggagattaccgaatcaaaaaaatttcaaggaaaccgaaatcaaaaaaaagaataaaaaaaaaatgatgaattgaaaaggtggtatggtgcactctcagtacaatctgctctgatgccgcatagttaagccagccccgacacccgccaacacccgctgacgcgccctgacgggcttgtctgctcccggcatccgcttacagacaagctgtgaccgtctccgggagctgcatgtgtcagaggttttcaccgtcatcaccgaaacgcgcga

SEQ ID NO: 3918 - RNA, 10746 nt, Saccharomyces cerevisiae
  source 1..10746: mol_type = other RNA
gacgaaagggcctcgtgatacgcctatttttataggttaatgtcatgataataatggtttcttagtatgatccaatatcaaaggaaatgatagcattgaaggatgagactaatccaattgaggagtggcagcatatagaacagctaaagggtagtgctgaaggaagcatacgataccccgcatggaatgggataatatcacaggaggtactagactacctttcatcctacataaatagacgcatataagtacgcatttaagcataaacacgcactatgccgttcttctcatgtatatatatatacaggcaacacgcagatataggtgcgacgtgaacagtgagctgtatgtgcgcagctcgcgttgcattttcggaagcgctcgttttcggaaacgctttgaagttcctattccgaagttcctattctctagaaagtataggaacttcagagcgcttttgaaaaccaaaagcgctctgaagacgcactttcaaaaaaccaaaaacgcaccggactgtaacgagctactaaaatattgcgaataccgcttccacaaacattgctcaaaagtatctctttgctatatatctctgtgctatatccctatataacctacccatccacctttcgctccttgaacttgcatctaaactcgacctctacattttttatgtttatctctagtattactctttagacaaaaaaattgtagtaagaactattcatagagtgaatcgaaaacaatacgaaaatgtaaacatttcctatacgtagtatatagagacaaaatagaagaaaccgttcataattttctgaccaatgaagaatcatcaacgctatcactttctgttcacaaagtatgcgcaatccacatcggtatagaatataatcggggatgcctttatcttgaaaaaatgcacccgcagcttcgctagtaatcagtaaacgcgggaagtggagtcaggctttttttatggaagagaaaatagacaccaaagtagccttcttctaaccttaacggacctacagtgcaaaaagttatcaagagactgcattatagagcgcacaaaggagaaaaaaagtaatctaagatgctttgttagaaaaatagcgctctcgggatgcatttttgtagaacaaaaaagaagtatagattctttgttggtaaaatagcgctctcgcgttgcatttctgttctgtaaaaatgcagctcagattctttgtttgaaaaattagcgctctcgcgttgcatttttgttttacaaaaatgaagcacagattcttcgttggtaaaatagcgctttcgcgttgcatttctgttctgtaaaaatgcagctcagattctttgtttgaaaaattagcgctctcgcgttgcatttttgttctacaaaatgaagcacagatgcttcgttcaggtggcacttttcggggaaatgtgcgcggaacccctatttgtttatttttctaaatacattcaaatatgtatccgctcatgagacaataaccctgataaatgcttcaataatattgaaaaaggaagagtatgagtattcaacatttccgtgtcgcccttattcccttttttgcggcattttgccttcctgtttttgctcacccagaaacgctggtgaaagtaaaagatgctgaagatcagttgggtgcacgagtgggttacatcgaactggatctcaacagcggtaagatccttgagagttttcgccccgaagaacgttttccaatgatgagcacttttaaagttctgctatgtggcgcggtattatcccgtattgacgccgggcaagagcaactcggtcgccgcatacactattctcagaatgacttggttgagtactcaccagtcacagaaaagcatcttacggatggcatgacagtaagagaattatgcagtgctgccataaccatgagtgataacactgcggccaacttacttctgacaacgatcggaggaccgaaggagctaaccgcttttttgcacaacatgggggatcatgtaactcgccttgatcgttgggaaccggagctgaatgaagccataccaaacgacgagcgtgacaccacgatgcctgtagcaatggcaacaacgttgcgcaaactattaactggcgaactacttactctagcttcccggcaacaattaatagactggatggaggcggataaagttgcaggaccacttctgcgctcggcccttccggctggctggtttattgctgataaatctggagccggtgagcgtgggtctcgcggtatcattgcagcactggggccagatggtaagccctcccgtatcgtagttatctacacgacggggagtcaggcaactatggatgaacgaaatagacagatcgctgagataggtgcctcactgattaagcattggtaactgtcagaccaagtttactcatatatactttagattgatttaaaacttcatttttaatttaaaaggatctaggtgaagatcctttttgataatctcatgaccaaaatcccttaacgtgagttttcgttccactgagcgtcagaccccgtagaaaagatcaaaggatcttcttgagatcctttttttctgcgcgtaatctgctgcttgcaaacaaaaaaaccaccgctaccagcggtggtttgtttgccggatcaagagctaccaactctttttccgaaggtaactggcttcagcagagcgcagataccaaatactgttcttctagtgtagccgtagttaggccaccacttcaagaactctgtagcaccgcctacatacctcgctctgctaatcctgttaccagtggctgctgccagtggcgataagtcgtgtcttaccgggttggactcaagacgatagttaccggataaggcgcagcggtcgggctgaacggggggttcgtgcacacagcccagcttggagcgaacgacctacaccgaactgagatacctacagcgtgagctatgagaaagcgccacgcttcccgaagggagaaaggcggacaggtatccggtaagcggcagggtcggaacaggagagcgcacgagggagcttccagggggaaacgcctggtatctttatagtcctgtcgggtttcgccacctctgacttgagcgtcgatttttgtgatgctcgtcaggggggcggagcctatggaaaaacgccagcaacgcggcctttttacggttcctggccttttgctggccttttgctcacatgttctttcctgcgttatcccctgattctgtggataaccgtattaccgcctttgagtgagctgataccgctcgccgcagccgaacgaccgagcgcagcgagtcagtgagcgaggaagcggaagagcgcccaatacgcaaaccgcctctccccgcgcgttggccgattcattaatgcagctggcacgacaggtttcccgactggaaagcgggcagtgagcgcaacgcaattaatgtgagttagctcactcattaggcaccccaggctttacactttatgcttccggctcgtatgttgtgtggaattgtgagcggataacaatttcacacaggaaacagctatgaccatgattacgccaagcgcgcaattaaccctcactaaagggaacaaaagctggagctccaccgcggtggcggcccccgtcccaccatcgggcgcggatcatcacaagtttgtacaaaaaagcaggctctttggccatataggccaccaggtcctgcaggcgcgctcttcaggaggcgcgccaactgccctcttaattaacgaagaagatcggaccggggccgcggatctttgcaaagatccaaaaaaagcatgcgtacggattagaagccgccgagcgggtgacagccctccgaaggaagactctcctccgtgcgtcctcgtcttcaccggtcgcgttcctgaaacgcagatgtgcctcgcgccgcactgctccgaacaataaagattctacaatactagcttttatggttatgaagaggaaaattggcagtaacctggccccacaaacctcaaatgaacgaatcaaattaacaaccagatatctcgactgaaaaaaaaggtttaaaccagttccctgaaattattcccctacttgactaataagtatataaagacggtaggtattgattgtaattctgtaaatctatttcttaaacttcttgaattctacttttatagttagtcttttttttagttttaaaacaccaagaacttagtttcgaataaacacacataaataaaccatgaaatcttctcaccatcaccatcaccatcaccatcaccatggttcttctatgaaaatcgaagaaggtaaactggtaatctggattaacggcgataaaggctataacggtctcgctgaagtcggtaagaaattcgagaaagataccggaattaaagtcaccgttgagcatccggataaactggaagagaaattcccacaggttgcggcaactggcgatggccctgacattatcttctgggcacacgaccgctttggtggctacgctcaatctggcctgttggctgaaatcaccccggacaaagcgttccaggacaagctgtatccgtttacctgggatgccgtacgttacaacggcaagctgattgcttacccgatcgctgttgaagcgttatcgctgatttataacaaagatctgctgccgaacccgccaaaaacctgggaagagatcccggcgctggataaagaactgaaagcgaaaggtaagagcgcgctgatgttcaacctgcaagaaccgtacttcacctggccgctgattgctgctgacgggggttatgcgttcaagtatgaaaacggcaagtacgacattaaagacgtgggcgtggataacgctggcgcgaaagcgggtctgaccttcctggttgacctgattaaaaacaaacacatgaatgcagacaccgattactccatcgcagaagctgcctttaataaaggcgaaacagcgatgaccatcaacggcccgtgggcatggtccaacatcgacaccagcaaagtgaattatggtgtaacggtactgccgaccttcaagggtcaaccatccaaaccgttcgttggcgtgctgagcgcaggtattaacgccgccagtccgaacaaagagctggcaaaagagttcctcgaaaactatctgctgactgatgaaggtctggaagcggttaataaagacaaaccgctgggtgccgtagcgctgaagtcttacgaggaagagttggcgaaagatccacgtattgccgccactatggaaaacgcccagaaaggtgaaatcatgccgaacatcccgcagatgtccgctttctggtatgccgtgcgtactgcggtgatcaacgccgccagcggtcgtcagactgtcgatgaagccctgaaagacgcgcagactaattcgagctcgaacaacaacaacaataacaataacaacaacctcgggatcgaggaaaacctgtacttccaatccaatgcagaggcagaatcagatgatgatttccagccaccgattatacgtcgaaagagatcaagtagagagaacacccaacagagtggatcgcaaaagagactgaagggaaaagacaaagaaatagtagcagatgataatcctatccttaataccacaactcttgatgattacgactacgatgatttccaacctcctgttgtcaaacgacctgatatcggcgaatcatcctcgtctgtcaaccccactttttttgctgcggaatcgagcacaagagcgagccacacgtccaacaacactccaaacaccccgagtaagcgtgtaataaccatcaagacaactattaaaggcatctggaagtatgattatcgacagcctttatatgaccttgtccacactaccaatttactggtcacacacacttatgcattcacgaaatacatatttttaaaagaactggcaaccgatgaaaacttcgcgttcaacgagcttatcacgaaagacttctttgtggaggtttttttgagtcttgtttctgcaaaagctggaaatagtgaaagactaaaggacacaaccaagagatacaggagtctgataggaaagcataaagatgcttattttgaagacgctaaatatactcctatcagcttagcatatgctcagcaaatagccttatacgagtgtgccaaagttcagacagcctattttaataatatgaaagctcattttgggaacagattgcgcgccttgataaacaagttgtttaaaaagaaggaaaaagtagagagccttacgaaagaaatggaagcaaacaactttagtatcaaggaaataaaacaagctatccgaaaaaatgtatatcaaccttgcaatcaagtaaaactggctattactaaaaaaaacatgcctgaatctggtcttctcgacgacaaatcagtaacacaactgaacgagtttttctccatgtacgcagtcgattatactttccagaaagaatcaattttttacgatgttgtggccaaccctgaaaagcatttcaaagcattttataaactggcccaactttctgaggcttatgaagtcaaaccttttgcttgttttccgcttcgaagaacattcatcccttgttacatgactgtagatagcaagatattgaattaccacattttaaaaaacaaaaaggtactaaagatggacgaaaaattcaacgcctggggcagagttgtgaacctcgagagaaaggcgtttaaatctcaaggctgtaaaaaaactttacattttcaaggaactttagagaccgacggagttggcgtgtcaatattgaagcagaacacggacacgaacagaaagtcggttatgccaaagaaaccactggaagatatcgacgatgaaacgaagtatatagagaaacttgaagatgctgaattgaaacaaacattaggcaagtgcgtgcttatggatccaggaaggagggacctactttattgcatgaaagaaacaagccgggcagataaaaaggaaataatgattttcacgaaaaatgaccgatcaaaatgttcaaggcacttcagacgtctgagaaagcttcttcagccgtcccaaattcgagaagccgaaacttatctctctgggtttgcaactaaatccgtaaacatggaaaaatttgtagagtacatacaggcaagggcatcagtcaaagacatcttgtacgagtactacggaaatgagacagcaaagtctatcacagagttttaccctgaatcacaatttgacttcaaagttgatcaaaagtgcaacctgtattacgaaaatctattcgttgcaaaaattcgaggtttctacccccagccagaacatgaaccaaacgatatcactctgaagtctcatatgtatcatacatatctacaaataatgttaaaccaaaagcacatttccgagaggcttaacagcgaaaaaagaagaaaaatcgaagatttggcaaaagcaatccttgaacaacctcatgaaagtggccataaaacaaccattagctctttattgggaaaacttcgattgttaccttttagaaaaatgaagttttcgacaaaactgttttctgacaacaatgaccgaaaactcgtgaaaaacataaagaaaaagtttggtgcagacgctgtgttagttttaggcaactggtctgcccccaatacgaagtaccaagatccaacaagaaataaagggctaagacgtatgctgaaaaaaaacggctttccactctacttgattgacgaatttcgaacttcatcattttgcccgaaatgcgagagcgatttggaaaagttcaaggttatcccaaaccctcgcccacataatcaggaaaaacagcctaaggtattgtgccatggattgttgaggtgtaagaatatgtcatgtcttgagcagcagacatctgaaggaaatcaaaggttatggaaccgcgatcaagctgcagtgttgaatttccgaaagattttgaattgtttacgagagacaaagcaacgaccgcctcttttttctagagaaccatcgaaaaattaaatacgcataaacaaacaaaatgtaattatccaccaaagttatcgctttggtcaattaatgcaggtaagcaacatccagcaaacagagctcgttcaaaaactaatttccttttgactaattttcttctttgaattcgtccaaaaaaggtaaacaagttgtctaaaaatcaattttgattcgtccggaaaaaaactaacaacgtctaattttagtctaaaaaactgtatgaaagtcttcaatctttccccagctatagtatttcaggcaggtagaggctggcggcgtttaaatccgaatctgcccaaactgatttttttctttcgcttaagtcgactttgttcccactgtacttttagctcgtacaaaatacaatatacttttcatttctccgtaaacaacatgttttcccatgtaatatccttttctatttttcgttccgttaccaactttacacatactttatatagctattcacttctatacactaaaaaactaagacaattttaattttgctgcctgccatatttcaatttgttataaattcctataatttatcctattagtagctaaaaaaagatgaatgtgaatcgaatcctaagagaattcccctcgaagatcgatctggcggcccggccggccgcggccgcactcgagatatctagacccagctttcttgtacaaagtggtgatagcttgtcgagaagtactcgagggggggcccggtacccaattcgccctatagtgagtcgtattacgcgcgctcactggccgtcgttttacaacgtcgtgactgggaaaaccctggcgttacccaacttaatcgccttgcagcacatccccctttcgccagctggcgtaatagcgaagaggcccgcaccgatcgcccttcccaacagttgcgcagcctgaatggcgaatggacgcgccctgtagcggcgcattaagcgcggcgggtgtggtggttacgcgcagcgtgaccgctacacttgccagcgccctagcgcccgctcctttcgctttcttcccttcctttctcgccacgttcgccggctttccccgtcaagctctaaatcgggggctccctttagggttccgatttagtgctttacggcacctcgaccccaaaaaacttgattagggtgatggttcacgtagtgggccatcgccctgatagacggtttttcgccctttgacgttggagtccacgttctttaatagtggactcttgttccaaactggaacaacactcaaccctatctcggtctattcttttgatttataagggattttgccgatttcggcctattggttaaaaaatgagctgatttaacaaaaatttaacgcgaattttaacaaaatattaacgcttacaatttcctgatgcggtattttctccttacgcatctgtgcggtatttcacaccgcatagggtaataactgatataattaaattgaagctctaatttgtgagtttagtatacatgcatttacttataatacagttttttagttttgctggccgcatcttctcaaatatgcttcccagcctgcttttctgtaacgttcaccctctaccttagcatcccttccctttgcaaatagtcctcttccaacaataataatgtcagatcctgtagagaccacatcatccacggttctatactgttgacccaatgcgtctcccttgtcatctaaacccacaccgggtgtcataatcaaccaatcgtaaccttcatctcttccacccatgtctctttgagcaataaagccgataacaaaatctttgtcgctcttcgcaatgtcaacagtacccttagtatattctccagtagatagggagcccttgcatgacaattctgctaacatcaaaaggcctctaggttcctttgttacttcttctgccgcctgcttcaaaccgctaacaatacctgggcccaccacaccgtgtgcattcgtaatgtctgcccattctgctattctgtatacacccgcagagtactgcaatttgactgtattaccaatgtcagcaaattttctgtcttcgaagagtaaaaaattgtacttggcggataatgcctttagcggcttaactgtgccctccatggaaaaatcagtcaagatatccacatgtgtttttagtaaacaaattttgggacctaatgcttcaactaactccagtaattccttggtggtacgaacatccaatgaagcacacaagtttgtttgcttttcgtgcatgatattaaatagcttggcagcaacaggactaggatgagtagcagcacgttccttatatgtagctttcgacatgatttatcttcgtttcctgcaggtttttgttctgtgcagttgggttaagaatactgggcaatttcatgtttcttcaacactacatatgcgtatatataccaatctaagtctgtgctccttccttcgttcttccttctgttcggagattaccgaatcaaaaaaatttcaaggaaaccgaaatcaaaaaaaagaataaaaaaaaaatgatgaattgaaaaggtggtatggtgcactctcagtacaatctgctctgatgccgcatagttaagccagccccgacacccgccaacacccgctgacgcgccctgacgggcttgtctgctcccggcatccgcttacagacaagctgtgaccgtctccgggagctgcatgtgtcagaggttttcaccgtcatcaccgaaacgcgcga

SEQ ID NO: 3919 - RNA, 10565 nt, Saccharomyces cerevisiae
  source 1..10565: mol_type = other RNA
gacgaaagggcctcgtgatacgcctatttttataggttaatgtcatgataataatggtttcttagtatgatccaatatcaaaggaaatgatagcattgaaggatgagactaatccaattgaggagtggcagcatatagaacagctaaagggtagtgctgaaggaagcatacgataccccgcatggaatgggataatatcacaggaggtactagactacctttcatcctacataaatagacgcatataagtacgcatttaagcataaacacgcactatgccgttcttctcatgtatatatatatacaggcaacacgcagatataggtgcgacgtgaacagtgagctgtatgtgcgcagctcgcgttgcattttcggaagcgctcgttttcggaaacgctttgaagttcctattccgaagttcctattctctagaaagtataggaacttcagagcgcttttgaaaaccaaaagcgctctgaagacgcactttcaaaaaaccaaaaacgcaccggactgtaacgagctactaaaatattgcgaataccgcttccacaaacattgctcaaaagtatctctttgctatatatctctgtgctatatccctatataacctacccatccacctttcgctccttgaacttgcatctaaactcgacctctacattttttatgtttatctctagtattactctttagacaaaaaaattgtagtaagaactattcatagagtgaatcgaaaacaatacgaaaatgtaaacatttcctatacgtagtatatagagacaaaatagaagaaaccgttcataattttctgaccaatgaagaatcatcaacgctatcactttctgttcacaaagtatgcgcaatccacatcggtatagaatataatcggggatgcctttatcttgaaaaaatgcacccgcagcttcgctagtaatcagtaaacgcgggaagtggagtcaggctttttttatggaagagaaaatagacaccaaagtagccttcttctaaccttaacggacctacagtgcaaaaagttatcaagagactgcattatagagcgcacaaaggagaaaaaaagtaatctaagatgctttgttagaaaaatagcgctctcgggatgcatttttgtagaacaaaaaagaagtatagattctttgttggtaaaatagcgctctcgcgttgcatttctgttctgtaaaaatgcagctcagattctttgtttgaaaaattagcgctctcgcgttgcatttttgttttacaaaaatgaagcacagattcttcgttggtaaaatagcgctttcgcgttgcatttctgttctgtaaaaatgcagctcagattctttgtttgaaaaattagcgctctcgcgttgcatttttgttctacaaaatgaagcacagatgcttcgttcaggtggcacttttcggggaaatgtgcgcggaacccctatttgtttatttttctaaatacattcaaatatgtatccgctcatgagacaataaccctgataaatgcttcaataatattgaaaaaggaagagtatgagtattcaacatttccgtgtcgcccttattcccttttttgcggcattttgccttcctgtttttgctcacccagaaacgctggtgaaagtaaaagatgctgaagatcagttgggtgcacgagtgggttacatcgaactggatctcaacagcggtaagatccttgagagttttcgccccgaagaacgttttccaatgatgagcacttttaaagttctgctatgtggcgcggtattatcccgtattgacgccgggcaagagcaactcggtcgccgcatacactattctcagaatgacttggttgagtactcaccagtcacagaaaagcatcttacggatggcatgacagtaagagaattatgcagtgctgccataaccatgagtgataacactgcggccaacttacttctgacaacgatcggaggaccgaaggagctaaccgcttttttgcacaacatgggggatcatgtaactcgccttgatcgttgggaaccggagctgaatgaagccataccaaacgacgagcgtgacaccacgatgcctgtagcaatggcaacaacgttgcgcaaactattaactggcgaactacttactctagcttcccggcaacaattaatagactggatggaggcggataaagttgcaggaccacttctgcgctcggcccttccggctggctggtttattgctgataaatctggagccggtgagcgtgggtctcgcggtatcattgcagcactggggccagatggtaagccctcccgtatcgtagttatctacacgacggggagtcaggcaactatggatgaacgaaatagacagatcgctgagataggtgcctcactgattaagcattggtaactgtcagaccaagtttactcatatatactttagattgatttaaaacttcatttttaatttaaaaggatctaggtgaagatcctttttgataatctcatgaccaaaatcccttaacgtgagttttcgttccactgagcgtcagaccccgtagaaaagatcaaaggatcttcttgagatcctttttttctgcgcgtaatctgctgcttgcaaacaaaaaaaccaccgctaccagcggtggtttgtttgccggatcaagagctaccaactctttttccgaaggtaactggcttcagcagagcgcagataccaaatactgttcttctagtgtagccgtagttaggccaccacttcaagaactctgtagcaccgcctacatacctcgctctgctaatcctgttaccagtggctgctgccagtggcgataagtcgtgtcttaccgggttggactcaagacgatagttaccggataaggcgcagcggtcgggctgaacggggggttcgtgcacacagcccagcttggagcgaacgacctacaccgaactgagatacctacagcgtgagctatgagaaagcgccacgcttcccgaagggagaaaggcggacaggtatccggtaagcggcagggtcggaacaggagagcgcacgagggagcttccagggggaaacgcctggtatctttatagtcctgtcgggtttcgccacctctgacttgagcgtcgatttttgtgatgctcgtcaggggggcggagcctatggaaaaacgccagcaacgcggcctttttacggttcctggccttttgctggccttttgctcacatgttctttcctgcgttatcccctgattctgtggataaccgtattaccgcctttgagtgagctgataccgctcgccgcagccgaacgaccgagcgcagcgagtcagtgagcgaggaagcggaagagcgcccaatacgcaaaccgcctctccccgcgcgttggccgattcattaatgcagctggcacgacaggtttcccgactggaaagcgggcagtgagcgcaacgcaattaatgtgagttagctcactcattaggcaccccaggctttacactttatgcttccggctcgtatgttgtgtggaattgtgagcggataacaatttcacacaggaaacagctatgaccatgattacgccaagcgcgcaattaaccctcactaaagggaacaaaagctggagctccaccgcggtggcggcccccgtcccaccatcgggcgcggatcatcacaagtttgtacaaaaaagcaggctctttggccatataggccaccaggtcctgcaggcgcgctcttcaggaggcgcgccaactgccctcttaattaacgaagaagatcggaccggggccgcggatctttgcaaagatccaaaaaaagcatgcgtacggattagaagccgccgagcgggtgacagccctccgaaggaagactctcctccgtgcgtcctcgtcttcaccggtcgcgttcctgaaacgcagatgtgcctcgcgccgcactgctccgaacaataaagattctacaatactagcttttatggttatgaagaggaaaattggcagtaacctggccccacaaacctcaaatgaacgaatcaaattaacaaccagatatctcgactgaaaaaaaaggtttaaaccagttccctgaaattattcccctacttgactaataagtatataaagacggtaggtattgattgtaattctgtaaatctatttcttaaacttcttgaattctacttttatagttagtcttttttttagttttaaaacaccaagaacttagtttcgaataaacacacataaataaaccatgaaatcttctcaccatcaccatcaccatcaccatcaccatggttcttctatgaaaatcgaagaaggtaaactggtaatctggattaacggcgataaaggctataacggtctcgctgaagtcggtaagaaattcgagaaagataccggaattaaagtcaccgttgagcatccggataaactggaagagaaattcccacaggttgcggcaactggcgatggccctgacattatcttctgggcacacgaccgctttggtggctacgctcaatctggcctgttggctgaaatcaccccggacaaagcgttccaggacaagctgtatccgtttacctgggatgccgtacgttacaacggcaagctgattgcttacccgatcgctgttgaagcgttatcgctgatttataacaaagatctgctgccgaacccgccaaaaacctgggaagagatcccggcgctggataaagaactgaaagcgaaaggtaagagcgcgctgatgttcaacctgcaagaaccgtacttcacctggccgctgattgctgctgacgggggttatgcgttcaagtatgaaaacggcaagtacgacattaaagacgtgggcgtggataacgctggcgcgaaagcgggtctgaccttcctggttgacctgattaaaaacaaacacatgaatgcagacaccgattactccatcgcagaagctgcctttaataaaggcgaaacagcgatgaccatcaacggcccgtgggcatggtccaacatcgacaccagcaaagtgaattatggtgtaacggtactgccgaccttcaagggtcaaccatccaaaccgttcgttggcgtgctgagcgcaggtattaacgccgccagtccgaacaaagagctggcaaaagagttcctcgaaaactatctgctgactgatgaaggtctggaagcggttaataaagacaaaccgctgggtgccgtagcgctgaagtcttacgaggaagagttggcgaaagatccacgtattgccgccactatggaaaacgcccagaaaggtgaaatcatgccgaacatcccgcagatgtccgctttctggtatgccgtgcgtactgcggtgatcaacgccgccagcggtcgtcagactgtcgatgaagccctgaaagacgcgcagactaattcgagctcgaacaacaacaacaataacaataacaacaacctcgggatcgaggaaaacctgtacttccaatccaatgcagaccctcccctagaaggcggagaagaccagggtatctcgcaccgcgtcgtgaaacataacctcgcgcgcgtgctgcgtgaccccgacaagctcgaggtcctctgcggcatggtcaaaggcggccatcacatcgtggtgcacgcgtaccagttcatcaagctgtttatcctgcacgagtacgagacgcacatcaagagcgccaagggcggcacgagcaccgagggcggcacgagcaccgagggtggcacgagcgccaagggcggcacgagcacccctgagctcacaccagtgacggtgtcctttgtgcagtgcgtggtgacggtcctatgtgaggagacgggggcccgagagaccaaggtgcgcacagaggccaagaccgagctcaagaagaagctgaaggacttttaccgcctgcactacaaggagacggtcagcccccaccagcagggactcggcttcaacaaccaggcgcagatagtggcctacttggccgtgcaggtggtgactagcttggtgaacaacatccagcgccggtacgtgcagcacctcgatatcttcctcaggacgctgtacgggggcgaggtgctcgcgctgacggaggaggtgaggaagttggacaatcagctcagagccagcaagacgaaggaggccaggagcaaggcggcccgcaagaagaaggccaaagaggaggcggcgttgagggccaagctcgtcgacgaaagaaaggcgctcgtgacagcgaagacgacgcgcgcaaggaagatcgccgaggcgagagactttgtcttgttcgacgccaagaagccggctgcggcgaaggcggccaagacggaggcggccaagacggaggcggctgcggcgaaggcggccaagacggaggcggctgcgactcggaagcgcgccaagacggaggcggctgcggccaaggcggccaagacggagccggctgtgactcggaagcgcgccaaggcgggggggcatgcggtggaggagcctgcggcgaaagccccagtccctccccctgctcgcactatgcccccagagctgattgatcactggaggtggattcggccagaccgccccatccagcaagactctgtctactacgacattcaagccgctcccctggactatttgccgtgcatgatctacatgtcgcgatttgctcaggccgctggccagcgggtcctgaacgtgtttccgcagaggtcgtctctcgtgcctgcgtacatcactgtggacaccacgctagccatcaagtttctgctcccagacgacttcatgttgaaagggcagaccaagaaacctacgcaaagacagctcctcgacaacatcacccgccaccaggacgagatttgggcgagcgtggtgaagttggagaagcgctgctttgccccgcggaacagcaagtacgaatttggttggcaattcaccacggacggtattggctgctccttgctgtgggtttcgcgcgggacgcacaccgccagccgcgagaacaaggaggcgggcaaccgccacaagcgcggccggcccggtcccagcacgaaggaggagcccaagacgcgagccgaggtgcgtgaggccatgtactcgtgggcggcagcggctgggcgcctagtggtgggcgtggaccccggccgcgacgacctactcttttgctcgcgggagaagagcgatgaggagaagcgcgttgaggggtcgagggaggcgtcttggcatttctcggcgaagcagcggcgtcacgagaccggcgcgaccaggtacaggaagaaacgcgccatcatgtccaagtggccggtcggcgagaagagcgtgcaggcctgggagtcggagctgagcgagttcagtcgcaaggcgatgacgaccgcctcgttcaaagcgtactgcaaggcaaagaacgcgttgaacgcgcgtttgtacccccactacgagcgcgtggcttaccgaaagatgcgctggcatcagtacatcaactcccagcgaagcgatgccaagatggtgaacgacttcggcgccaagctcggcaccaaggagcaggtcgtgctcgcgtacggggactggggccatggctcctcccacatgaagtaccaggctccgacgaggcgagtgggcatgcagcggctgttcgagaaggcggggtacctcgtagtgcttgtagacgagtacttgacgtcgcgcacgtgctacaagtgcgaccaccggtgcgccaatttcaaaatggtgccccaaccgcgcccttggatgcgcgagacgagacctaaagtcctgagacacggcctgctgcgatgcaaaaattgcagcacgcactggaacagagacaggaacgggtcgctcaatatcatgaggtgcggaatagcggcgagggacaacctcgacaggccgccctgcatggacaggatcaaattcggtgagacaaaggaagcagcagaggctgaggctatccgacaggcggagtcggaggccggttcgctatcggatctcacaaccacggcacgtcatgagtcataacttatggcgtgtcaacccacgtcgttatgacgtcgtggggcggtttattatttttgtgtcggcctcaaaatttgagggcacagttgtgtggtgccacgtgaacagctgtttgtcgtctgacgagcagcgtttgctgaaccactttaatacaccatacccaacacggacaaatgtgcggcttaagtcgactttgttcccactgtacttttagctcgtacaaaatacaatatacttttcatttctccgtaaacaacatgttttcccatgtaatatccttttctatttttcgttccgttaccaactttacacatactttatatagctattcacttctatacactaaaaaactaagacaattttaattttgctgcctgccatatttcaatttgttataaattcctataatttatcctattagtagctaaaaaaagatgaatgtgaatcgaatcctaagagaattcccctcgaagatcgatctggcggcccggccggccgcggccgcactcgagatatctagacccagctttcttgtacaaagtggtgatagcttgtcgagaagtactcgagggggggcccggtacccaattcgccctatagtgagtcgtattacgcgcgctcactggccgtcgttttacaacgtcgtgactgggaaaaccctggcgttacccaacttaatcgccttgcagcacatccccctttcgccagctggcgtaatagcgaagaggcccgcaccgatcgcccttcccaacagttgcgcagcctgaatggcgaatggacgcgccctgtagcggcgcattaagcgcggcgggtgtggtggttacgcgcagcgtgaccgctacacttgccagcgccctagcgcccgctcctttcgctttcttcccttcctttctcgccacgttcgccggctttccccgtcaagctctaaatcgggggctccctttagggttccgatttagtgctttacggcacctcgaccccaaaaaacttgattagggtgatggttcacgtagtgggccatcgccctgatagacggtttttcgccctttgacgttggagtccacgttctttaatagtggactcttgttccaaactggaacaacactcaaccctatctcggtctattcttttgatttataagggattttgccgatttcggcctattggttaaaaaatgagctgatttaacaaaaatttaacgcgaattttaacaaaatattaacgcttacaatttcctgatgcggtattttctccttacgcatctgtgcggtatttcacaccgcatagggtaataactgatataattaaattgaagctctaatttgtgagtttagtatacatgcatttacttataatacagttttttagttttgctggccgcatcttctcaaatatgcttcccagcctgcttttctgtaacgttcaccctctaccttagcatcccttccctttgcaaatagtcctcttccaacaataataatgtcagatcctgtagagaccacatcatccacggttctatactgttgacccaatgcgtctcccttgtcatctaaacccacaccgggtgtcataatcaaccaatcgtaaccttcatctcttccacccatgtctctttgagcaataaagccgataacaaaatctttgtcgctcttcgcaatgtcaacagtacccttagtatattctccagtagatagggagcccttgcatgacaattctgctaacatcaaaaggcctctaggttcctttgttacttcttctgccgcctgcttcaaaccgctaacaatacctgggcccaccacaccgtgtgcattcgtaatgtctgcccattctgctattctgtatacacccgcagagtactgcaatttgactgtattaccaatgtcagcaaattttctgtcttcgaagagtaaaaaattgtacttggcggataatgcctttagcggcttaactgtgccctccatggaaaaatcagtcaagatatccacatgtgtttttagtaaacaaattttgggacctaatgcttcaactaactccagtaattccttggtggtacgaacatccaatgaagcacacaagtttgtttgcttttcgtgcatgatattaaatagcttggcagcaacaggactaggatgagtagcagcacgttccttatatgtagctttcgacatgatttatcttcgtttcctgcaggtttttgttctgtgcagttgggttaagaatactgggcaatttcatgtttcttcaacactacatatgcgtatatataccaatctaagtctgtgctccttccttcgttcttccttctgttcggagattaccgaatcaaaaaaatttcaaggaaaccgaaatcaaaaaaaagaataaaaaaaaaatgatgaattgaaaaggtggtatggtgcactctcagtacaatctgctctgatgccgcatagttaagccagccccgacacccgccaacacccgctgacgcgccctgacgggcttgtctgctcccggcatccgcttacagacaagctgtgaccgtctccgggagctgcatgtgtcagaggttttcaccgtcatcaccgaaacgcgcga

SEQ ID NO: 3920 - RNA, 10264 nt, Saccharomyces cerevisiae
  source 1..10264: mol_type = other RNA
gacgaaagggcctcgtgatacgcctatttttataggttaatgtcatgataataatggtttcttagtatgatccaatatcaaaggaaatgatagcattgaaggatgagactaatccaattgaggagtggcagcatatagaacagctaaagggtagtgctgaaggaagcatacgataccccgcatggaatgggataatatcacaggaggtactagactacctttcatcctacataaatagacgcatataagtacgcatttaagcataaacacgcactatgccgttcttctcatgtatatatatatacaggcaacacgcagatataggtgcgacgtgaacagtgagctgtatgtgcgcagctcgcgttgcattttcggaagcgctcgttttcggaaacgctttgaagttcctattccgaagttcctattctctagaaagtataggaacttcagagcgcttttgaaaaccaaaagcgctctgaagacgcactttcaaaaaaccaaaaacgcaccggactgtaacgagctactaaaatattgcgaataccgcttccacaaacattgctcaaaagtatctctttgctatatatctctgtgctatatccctatataacctacccatccacctttcgctccttgaacttgcatctaaactcgacctctacattttttatgtttatctctagtattactctttagacaaaaaaattgtagtaagaactattcatagagtgaatcgaaaacaatacgaaaatgtaaacatttcctatacgtagtatatagagacaaaatagaagaaaccgttcataattttctgaccaatgaagaatcatcaacgctatcactttctgttcacaaagtatgcgcaatccacatcggtatagaatataatcggggatgcctttatcttgaaaaaatgcacccgcagcttcgctagtaatcagtaaacgcgggaagtggagtcaggctttttttatggaagagaaaatagacaccaaagtagccttcttctaaccttaacggacctacagtgcaaaaagttatcaagagactgcattatagagcgcacaaaggagaaaaaaagtaatctaagatgctttgttagaaaaatagcgctctcgggatgcatttttgtagaacaaaaaagaagtatagattctttgttggtaaaatagcgctctcgcgttgcatttctgttctgtaaaaatgcagctcagattctttgtttgaaaaattagcgctctcgcgttgcatttttgttttacaaaaatgaagcacagattcttcgttggtaaaatagcgctttcgcgttgcatttctgttctgtaaaaatgcagctcagattctttgtttgaaaaattagcgctctcgcgttgcatttttgttctacaaaatgaagcacagatgcttcgttcaggtggcacttttcggggaaatgtgcgcggaacccctatttgtttatttttctaaatacattcaaatatgtatccgctcatgagacaataaccctgataaatgcttcaataatattgaaaaaggaagagtatgagtattcaacatttccgtgtcgcccttattcccttttttgcggcattttgccttcctgtttttgctcacccagaaacgctggtgaaagtaaaagatgctgaagatcagttgggtgcacgagtgggttacatcgaactggatctcaacagcggtaagatccttgagagttttcgccccgaagaacgttttccaatgatgagcacttttaaagttctgctatgtggcgcggtattatcccgtattgacgccgggcaagagcaactcggtcgccgcatacactattctcagaatgacttggttgagtactcaccagtcacagaaaagcatcttacggatggcatgacagtaagagaattatgcagtgctgccataaccatgagtgataacactgcggccaacttacttctgacaacgatcggaggaccgaaggagctaaccgcttttttgcacaacatgggggatcatgtaactcgccttgatcgttgggaaccggagctgaatgaagccataccaaacgacgagcgtgacaccacgatgcctgtagcaatggcaacaacgttgcgcaaactattaactggcgaactacttactctagcttcccggcaacaattaatagactggatggaggcggataaagttgcaggaccacttctgcgctcggcccttccggctggctggtttattgctgataaatctggagccggtgagcgtgggtctcgcggtatcattgcagcactggggccagatggtaagccctcccgtatcgtagttatctacacgacggggagtcaggcaactatggatgaacgaaatagacagatcgctgagataggtgcctcactgattaagcattggtaactgtcagaccaagtttactcatatatactttagattgatttaaaacttcatttttaatttaaaaggatctaggtgaagatcctttttgataatctcatgaccaaaatcccttaacgtgagttttcgttccactgagcgtcagaccccgtagaaaagatcaaaggatcttcttgagatcctttttttctgcgcgtaatctgctgcttgcaaacaaaaaaaccaccgctaccagcggtggtttgtttgccggatcaagagctaccaactctttttccgaaggtaactggcttcagcagagcgcagataccaaatactgttcttctagtgtagccgtagttaggccaccacttcaagaactctgtagcaccgcctacatacctcgctctgctaatcctgttaccagtggctgctgccagtggcgataagtcgtgtcttaccgggttggactcaagacgatagttaccggataaggcgcagcggtcgggctgaacggggggttcgtgcacacagcccagcttggagcgaacgacctacaccgaactgagatacctacagcgtgagctatgagaaagcgccacgcttcccgaagggagaaaggcggacaggtatccggtaagcggcagggtcggaacaggagagcgcacgagggagcttccagggggaaacgcctggtatctttatagtcctgtcgggtttcgccacctctgacttgagcgtcgatttttgtgatgctcgtcaggggggcggagcctatggaaaaacgccagcaacgcggcctttttacggttcctggccttttgctggccttttgctcacatgttctttcctgcgttatcccctgattctgtggataaccgtattaccgcctttgagtgagctgataccgctcgccgcagccgaacgaccgagcgcagcgagtcagtgagcgaggaagcggaagagcgcccaatacgcaaaccgcctctccccgcgcgttggccgattcattaatgcagctggcacgacaggtttcccgactggaaagcgggcagtgagcgcaacgcaattaatgtgagttagctcactcattaggcaccccaggctttacactttatgcttccggctcgtatgttgtgtggaattgtgagcggataacaatttcacacaggaaacagctatgaccatgattacgccaagcgcgcaattaaccctcactaaagggaacaaaagctggagctccaccgcggtggcggcccccgtcccaccatcgggcgcggatcatcacaagtttgtacaaaaaagcaggctctttggccatataggccaccaggtcctgcaggcgcgctcttcaggaggcgcgccaactgccctcttaattaacgaagaagatcggaccggggccgcggatctttgcaaagatccaaaaaaagcatgcgtacggattagaagccgccgagcgggtgacagccctccgaaggaagactctcctccgtgcgtcctcgtcttcaccggtcgcgttcctgaaacgcagatgtgcctcgcgccgcactgctccgaacaataaagattctacaatactagcttttatggttatgaagaggaaaattggcagtaacctggccccacaaacctcaaatgaacgaatcaaattaacaaccagatatctcgactgaaaaaaaaggtttaaaccagttccctgaaattattcccctacttgactaataagtatataaagacggtaggtattgattgtaattctgtaaatctatttcttaaacttcttgaattctacttttatagttagtcttttttttagttttaaaacaccaagaacttagtttcgaataaacacacataaataaaccatgaaatcttctcaccatcaccatcaccatcaccatcaccatggttcttctatgaaaatcgaagaaggtaaactggtaatctggattaacggcgataaaggctataacggtctcgctgaagtcggtaagaaattcgagaaagataccggaattaaagtcaccgttgagcatccggataaactggaagagaaattcccacaggttgcggcaactggcgatggccctgacattatcttctgggcacacgaccgctttggtggctacgctcaatctggcctgttggctgaaatcaccccggacaaagcgttccaggacaagctgtatccgtttacctgggatgccgtacgttacaacggcaagctgattgcttacccgatcgctgttgaagcgttatcgctgatttataacaaagatctgctgccgaacccgccaaaaacctgggaagagatcccggcgctggataaagaactgaaagcgaaaggtaagagcgcgctgatgttcaacctgcaagaaccgtacttcacctggccgctgattgctgctgacgggggttatgcgttcaagtatgaaaacggcaagtacgacattaaagacgtgggcgtggataacgctggcgcgaaagcgggtctgaccttcctggttgacctgattaaaaacaaacacatgaatgcagacaccgattactccatcgcagaagctgcctttaataaaggcgaaacagcgatgaccatcaacggcccgtgggcatggtccaacatcgacaccagcaaagtgaattatggtgtaacggtactgccgaccttcaagggtcaaccatccaaaccgttcgttggcgtgctgagcgcaggtattaacgccgccagtccgaacaaagagctggcaaaagagttcctcgaaaactatctgctgactgatgaaggtctggaagcggttaataaagacaaaccgctgggtgccgtagcgctgaagtcttacgaggaagagttggcgaaagatccacgtattgccgccactatggaaaacgcccagaaaggtgaaatcatgccgaacatcccgcagatgtccgctttctggtatgccgtgcgtactgcggtgatcaacgccgccagcggtcgtcagactgtcgatgaagccctgaaagacgcgcagactaattcgagctcgaacaacaacaacaataacaataacaacaacctcgggatcgaggaaaacctgtacttccaatccaatgcatcaaacattaggattgtaaaacgaaaggcgaagggcttcttcaagtgtgaggacctagtcacaatcaaggatgctgtcaaggcagctcataggatcatgtcagatgcgtccatactcgtccggtcatattatctgcgatggttccagagctcatatccccttgattcagatgacaaggaacttgagcttgagcacttccatatatccatggcctgcagcatagtccagggtataacaaggcctccagtccgtggtgttggtcctgaacaatctgtcaagatagacgtcttcaatgacatgttagatgagtataagaggctgtacgagcgtgctccaaatgataaagagaacgaaacggacctctctctatcgcatgtcttagcatattccatcgacaaccttcttaccgcgtataaaaacaacatcgaagcccatttctcaaaatatgtcaaacgcttcatccgatgtgatatgttggctaagggcttcaataagtctgaggcaaacagagtggcggcaatatataccaatgcctatatttatgactcatccctcgacctggaaccagactttatggaaagattaggccttgaggcaacaagttattcatctctattcccctctaagataaataagggcggttttccaagggtctatgacctgaaggccaacccttgggtctatcttccaaagatggtcatgataaatcaggccttagagacagacttctcttctgtagagcataaggagaggaggctgctcaatccactgcccttctattcatcgtttgttccgatgcacatacggattgatacatccggcttatcgcagctgctgatgactaaggataggcttgatgatttcaagagatcttatcttgctgagtttggagtaagtctaaatataaagaacaagggtgatatgctagcaagttttgagaagatctttggccggaaggcaacatccaatagagaggccggattgtatgcaacagagatgtggagcttcttgacaaacctgaagacatgccgtcaatggaaggagcttgatggggttgttcgtaagaacgatcccaagggaacacaatggatgtttgacaatgctgttgtaacggacggtgtttcaatctcattccaggtgatcgataacagcatgtttggacggaaggccttctctggcaggaagaagagggtagcatgtcaggaggccaatgatgaagaagatagcaagcaggtaacaagagaagagctaaagacatcgaagctcttgggatgtgaccctgggaagagagacatcctagcaataacagatggcataaagactatctgttacaccaaggggcagagagacatggacacgcataagacaataaggttgagaaccagtctgaagaggcgccgaggctgcggcctagaggagtatgagacacaggtgatgaaccggttccagaaacggtcatgccatcctgagatgtttcgacgctatgcctgttccaggaagaggatggaacacatgctgcttgaatgttattctcatccagtctttagagagttcaaattcttggtttacaacaagactaagagctccgaacataggttcatgcatagggtgttggaaacattcaaacggccgcaaacaaacctgagcaaggcgaggtgtgcgtcaggagttatgcgtatgaatgccttgaaggaggtccaaaggcatggagatatcattatagggtggggcaactggggaaagaatccaaacgcgctacgatgctcggcaggaccaaccccaggcattggaataaggagaaggtttgaatcgctgttcaaaacaacaacagtgccagaacactacacctcccaagaatgtccgagttgtaagggacgatgcctaagaaaggcaactggcaacccgatcatgagacaccatctgcttcgttgtacaaacgatagttgctgtagcaggtggtggaatcggaatgtagccggggcgttcaacatcctaacaaggctgttggatggacaaacactatccggtaacgaaactaccggagacgggttaggaggtgacgacctctaaaacctagaacttagagtgcaaaaacgccattacgattgtgatgcctattcaagggtgtcccaagtgtaaaaagaaagcactctaagagcattaaactctactctgtcaatgttctcaataaggatgtctgaagcgttctcattgcatgatagattgttccaagccttgtcggtcatctcatcgatttttatatttatgattttcatagcagtcggattattattcaaacaaagaccttctatgtcaagtttgctctcatcaacccatggtaatagtctataagacatatcttatcctccttaagtatttcctgttgtgcttaagtcgactttgttcccactgtacttttagctcgtacaaaatacaatatacttttcatttctccgtaaacaacatgttttcccatgtaatatccttttctatttttcgttccgttaccaactttacacatactttatatagctattcacttctatacactaaaaaactaagacaattttaattttgctgcctgccatatttcaatttgttataaattcctataatttatcctattagtagctaaaaaaagatgaatgtgaatcgaatcctaagagaattcccctcgaagatcgatctggcggcccggccggccgcggccgcactcgagatatctagacccagctttcttgtacaaagtggtgatagcttgtcgagaagtactcgagggggggcccggtacccaattcgccctatagtgagtcgtattacgcgcgctcactggccgtcgttttacaacgtcgtgactgggaaaaccctggcgttacccaacttaatcgccttgcagcacatccccctttcgccagctggcgtaatagcgaagaggcccgcaccgatcgcccttcccaacagttgcgcagcctgaatggcgaatggacgcgccctgtagcggcgcattaagcgcggcgggtgtggtggttacgcgcagcgtgaccgctacacttgccagcgccctagcgcccgctcctttcgctttcttcccttcctttctcgccacgttcgccggctttccccgtcaagctctaaatcgggggctccctttagggttccgatttagtgctttacggcacctcgaccccaaaaaacttgattagggtgatggttcacgtagtgggccatcgccctgatagacggtttttcgccctttgacgttggagtccacgttctttaatagtggactcttgttccaaactggaacaacactcaaccctatctcggtctattcttttgatttataagggattttgccgatttcggcctattggttaaaaaatgagctgatttaacaaaaatttaacgcgaattttaacaaaatattaacgcttacaatttcctgatgcggtattttctccttacgcatctgtgcggtatttcacaccgcatagggtaataactgatataattaaattgaagctctaatttgtgagtttagtatacatgcatttacttataatacagttttttagttttgctggccgcatcttctcaaatatgcttcccagcctgcttttctgtaacgttcaccctctaccttagcatcccttccctttgcaaatagtcctcttccaacaataataatgtcagatcctgtagagaccacatcatccacggttctatactgttgacccaatgcgtctcccttgtcatctaaacccacaccgggtgtcataatcaaccaatcgtaaccttcatctcttccacccatgtctctttgagcaataaagccgataacaaaatctttgtcgctcttcgcaatgtcaacagtacccttagtatattctccagtagatagggagcccttgcatgacaattctgctaacatcaaaaggcctctaggttcctttgttacttcttctgccgcctgcttcaaaccgctaacaatacctgggcccaccacaccgtgtgcattcgtaatgtctgcccattctgctattctgtatacacccgcagagtactgcaatttgactgtattaccaatgtcagcaaattttctgtcttcgaagagtaaaaaattgtacttggcggataatgcctttagcggcttaactgtgccctccatggaaaaatcagtcaagatatccacatgtgtttttagtaaacaaattttgggacctaatgcttcaactaactccagtaattccttggtggtacgaacatccaatgaagcacacaagtttgtttgcttttcgtgcatgatattaaatagcttggcagcaacaggactaggatgagtagcagcacgttccttatatgtagctttcgacatgatttatcttcgtttcctgcaggtttttgttctgtgcagttgggttaagaatactgggcaatttcatgtttcttcaacactacatatgcgtatatataccaatctaagtctgtgctccttccttcgttcttccttctgttcggagattaccgaatcaaaaaaatttcaaggaaaccgaaatcaaaaaaaagaataaaaaaaaaatgatgaattgaaaaggtggtatggtgcactctcagtacaatctgctctgatgccgcatagttaagccagccccgacacccgccaacacccgctgacgcgccctgacgggcttgtctgctcccggcatccgcttacagacaagctgtgaccgtctccgggagctgcatgtgtcagaggttttcaccgtcatcaccgaaacgcgcga

SEQ ID NO: 3921 - RNA, 9662 nt, Saccharomyces cerevisiae
  source 1..9662: mol_type = other RNA
gacgaaagggcctcgtgatacgcctatttttataggttaatgtcatgataataatggtttcttagtatgatccaatatcaaaggaaatgatagcattgaaggatgagactaatccaattgaggagtggcagcatatagaacagctaaagggtagtgctgaaggaagcatacgataccccgcatggaatgggataatatcacaggaggtactagactacctttcatcctacataaatagacgcatataagtacgcatttaagcataaacacgcactatgccgttcttctcatgtatatatatatacaggcaacacgcagatataggtgcgacgtgaacagtgagctgtatgtgcgcagctcgcgttgcattttcggaagcgctcgttttcggaaacgctttgaagttcctattccgaagttcctattctctagaaagtataggaacttcagagcgcttttgaaaaccaaaagcgctctgaagacgcactttcaaaaaaccaaaaacgcaccggactgtaacgagctactaaaatattgcgaataccgcttccacaaacattgctcaaaagtatctctttgctatatatctctgtgctatatccctatataacctacccatccacctttcgctccttgaacttgcatctaaactcgacctctacattttttatgtttatctctagtattactctttagacaaaaaaattgtagtaagaactattcatagagtgaatcgaaaacaatacgaaaatgtaaacatttcctatacgtagtatatagagacaaaatagaagaaaccgttcataattttctgaccaatgaagaatcatcaacgctatcactttctgttcacaaagtatgcgcaatccacatcggtatagaatataatcggggatgcctttatcttgaaaaaatgcacccgcagcttcgctagtaatcagtaaacgcgggaagtggagtcaggctttttttatggaagagaaaatagacaccaaagtagccttcttctaaccttaacggacctacagtgcaaaaagttatcaagagactgcattatagagcgcacaaaggagaaaaaaagtaatctaagatgctttgttagaaaaatagcgctctcgggatgcatttttgtagaacaaaaaagaagtatagattctttgttggtaaaatagcgctctcgcgttgcatttctgttctgtaaaaatgcagctcagattctttgtttgaaaaattagcgctctcgcgttgcatttttgttttacaaaaatgaagcacagattcttcgttggtaaaatagcgctttcgcgttgcatttctgttctgtaaaaatgcagctcagattctttgtttgaaaaattagcgctctcgcgttgcatttttgttctacaaaatgaagcacagatgcttcgttcaggtggcacttttcggggaaatgtgcgcggaacccctatttgtttatttttctaaatacattcaaatatgtatccgctcatgagacaataaccctgataaatgcttcaataatattgaaaaaggaagagtatgagtattcaacatttccgtgtcgcccttattcccttttttgcggcattttgccttcctgtttttgctcacccagaaacgctggtgaaagtaaaagatgctgaagatcagttgggtgcacgagtgggttacatcgaactggatctcaacagcggtaagatccttgagagttttcgccccgaagaacgttttccaatgatgagcacttttaaagttctgctatgtggcgcggtattatcccgtattgacgccgggcaagagcaactcggtcgccgcatacactattctcagaatgacttggttgagtactcaccagtcacagaaaagcatcttacggatggcatgacagtaagagaattatgcagtgctgccataaccatgagtgataacactgcggccaacttacttctgacaacgatcggaggaccgaaggagctaaccgcttttttgcacaacatgggggatcatgtaactcgccttgatcgttgggaaccggagctgaatgaagccataccaaacgacgagcgtgacaccacgatgcctgtagcaatggcaacaacgttgcgcaaactattaactggcgaactacttactctagcttcccggcaacaattaatagactggatggaggcggataaagttgcaggaccacttctgcgctcggcccttccggctggctggtttattgctgataaatctggagccggtgagcgtgggtctcgcggtatcattgcagcactggggccagatggtaagccctcccgtatcgtagttatctacacgacggggagtcaggcaactatggatgaacgaaatagacagatcgctgagataggtgcctcactgattaagcattggtaactgtcagaccaagtttactcatatatactttagattgatttaaaacttcatttttaatttaaaaggatctaggtgaagatcctttttgataatctcatgaccaaaatcccttaacgtgagttttcgttccactgagcgtcagaccccgtagaaaagatcaaaggatcttcttgagatcctttttttctgcgcgtaatctgctgcttgcaaacaaaaaaaccaccgctaccagcggtggtttgtttgccggatcaagagctaccaactctttttccgaaggtaactggcttcagcagagcgcagataccaaatactgttcttctagtgtagccgtagttaggccaccacttcaagaactctgtagcaccgcctacatacctcgctctgctaatcctgttaccagtggctgctgccagtggcgataagtcgtgtcttaccgggttggactcaagacgatagttaccggataaggcgcagcggtcgggctgaacggggggttcgtgcacacagcccagcttggagcgaacgacctacaccgaactgagatacctacagcgtgagctatgagaaagcgccacgcttcccgaagggagaaaggcggacaggtatccggtaagcggcagggtcggaacaggagagcgcacgagggagcttccagggggaaacgcctggtatctttatagtcctgtcgggtttcgccacctctgacttgagcgtcgatttttgtgatgctcgtcaggggggcggagcctatggaaaaacgccagcaacgcggcctttttacggttcctggccttttgctggccttttgctcacatgttctttcctgcgttatcccctgattctgtggataaccgtattaccgcctttgagtgagctgataccgctcgccgcagccgaacgaccgagcgcagcgagtcagtgagcgaggaagcggaagagcgcccaatacgcaaaccgcctctccccgcgcgttggccgattcattaatgcagctggcacgacaggtttcccgactggaaagcgggcagtgagcgcaacgcaattaatgtgagttagctcactcattaggcaccccaggctttacactttatgcttccggctcgtatgttgtgtggaattgtgagcggataacaatttcacacaggaaacagctatgaccatgattacgccaagcgcgcaattaaccctcactaaagggaacaaaagctggagctccaccgcggtggcggcccccgtcccaccatcgggcgcggatcatcacaagtttgtacaaaaaagcaggctctttggccatataggccaccaggtcctgcaggcgcgctcttcaggaggcgcgccaactgccctcttaattaacgaagaagatcggaccggggccgcggatctttgcaaagatccaaaaaaagcatgcgtacggattagaagccgccgagcgggtgacagccctccgaaggaagactctcctccgtgcgtcctcgtcttcaccggtcgcgttcctgaaacgcagatgtgcctcgcgccgcactgctccgaacaataaagattctacaatactagcttttatggttatgaagaggaaaattggcagtaacctggccccacaaacctcaaatgaacgaatcaaattaacaaccagatatctcgactgaaaaaaaaggtttaaaccagttccctgaaattattcccctacttgactaataagtatataaagacggtaggtattgattgtaattctgtaaatctatttcttaaacttcttgaattctacttttatagttagtcttttttttagttttaaaacaccaagaacttagtttcgaataaacacacataaataaaccatgaaatcttctcaccatcaccatcaccatcaccatcaccatggttcttctatgaaaatcgaagaaggtaaactggtaatctggattaacggcgataaaggctataacggtctcgctgaagtcggtaagaaattcgagaaagataccggaattaaagtcaccgttgagcatccggataaactggaagagaaattcccacaggttgcggcaactggcgatggccctgacattatcttctgggcacacgaccgctttggtggctacgctcaatctggcctgttggctgaaatcaccccggacaaagcgttccaggacaagctgtatccgtttacctgggatgccgtacgttacaacggcaagctgattgcttacccgatcgctgttgaagcgttatcgctgatttataacaaagatctgctgccgaacccgccaaaaacctgggaagagatcccggcgctggataaagaactgaaagcgaaaggtaagagcgcgctgatgttcaacctgcaagaaccgtacttcacctggccgctgattgctgctgacgggggttatgcgttcaagtatgaaaacggcaagtacgacattaaagacgtgggcgtggataacgctggcgcgaaagcgggtctgaccttcctggttgacctgattaaaaacaaacacatgaatgcagacaccgattactccatcgcagaagctgcctttaataaaggcgaaacagcgatgaccatcaacggcccgtgggcatggtccaacatcgacaccagcaaagtgaattatggtgtaacggtactgccgaccttcaagggtcaaccatccaaaccgttcgttggcgtgctgagcgcaggtattaacgccgccagtccgaacaaagagctggcaaaagagttcctcgaaaactatctgctgactgatgaaggtctggaagcggttaataaagacaaaccgctgggtgccgtagcgctgaagtcttacgaggaagagttggcgaaagatccacgtattgccgccactatggaaaacgcccagaaaggtgaaatcatgccgaacatcccgcagatgtccgctttctggtatgccgtgcgtactgcggtgatcaacgccgccagcggtcgtcagactgtcgatgaagccctgaaagacgcgcagactaattcgagctcgaacaacaacaacaataacaataacaacaacctcgggatcgaggaaaacctgtacttccaatccaatgcaaagcgcacctactcggcaaccaaatcgtctctcacgctatggacagcagccagcgtgaaaactacttcggctccaaaagtcgtgactaccttctcgggctggatgaaaaagattctcccgactcgagcagagacatcattgacactcatcaaccctgccgatatcgccgatccatcaccgcccaaaaagaaggccaagaagactacgccggctacaccaaaacctactctgcgaatctacaagatcggacttcgaccatcgccggctcagcgcaagactttgaacgcttgcatcgtggcagccaacttcgcttacaaccaatgtgtacatctcgtacaacacaaagtatgcaaaccacatctctatgacttgcagaagatcgtcgcaaaaatgaagactcctgaagatatcaaccaccgatacgctccagatcgagatggttggttttggaaatcgtccacgatcgtacgattgctagcaaccaaagacttttgcgctgcgtacaaggccatcgtctccaacaagaagaaggacgtggctgtcatcaagtacaaaacctacgacgatccggaggccatcaaccctctatctggactttttggctgtcaaaaacaatacgccactgttactcaagctggactacgactgctgcccaggttatttggcaaggatcccatcccgttggtcaagaagaagctgaaagtcgccacaatcgaccacgacttcaaaatcgaaaagacgtcaaagggcaaatttgtcctgtgtctgactgtcgaatgcagtttgctgagaagagtcaagccaccagccccgctgtttgaagacggatacattcacgcctgcggaatcgacccgggagtcaggagcttcgttactgtctacgatcccactcgacaggactgctaccagtttggcacgtcggcacaaaaagccgagcgactagaccctatcaccaacgctatcgacaactggaactctttcgtcgaccaacatcgcgacaaagcacctccaactgccatcgagagctggtcgaggaaaaccaagaagctgtggtacaagctgaaaaaccaagtcaggagtcttcacgaccaagtcatcgcccatctcctcggagcctacaacttcatcagcctgggcaagctggacgtgagctgctttcggcgaggaaccacggccaaatccaccaaccgctggctgaggatttacagacactttgaatttcggacaaaactgctcgctcgagtggagggaactgacaactgtagagtggagatcaccgacgaacgctggacctcaaagacgtgtggcatgtgcagatccatccaccgcgaacttggggcaaaagaactattcgagtgccccaactgccactacacctgccacagagacgtgcacgtagctcgaaacatcttgctgagaagcttcggacagtttccagtctagaaaaacacgaactttttccttggcccaaggattgccaaacaccactcaaatcctcgttcaggggcctcgagtggctgggcatatatgggttagcactgagacttcgataagaagcaacgatcttggacaccacgaaattgacgccatctcaccaacttacgtttgatgcgaaagtctgaattcatattaacttgtggtagacgatgctggtcaagaggaatgcttgaggaaaatgaacagcaacagcgctagcaaaacagtatgatcaaaacagtaggcctacagggcgatggctgatcaagttgcgcgcctaagccaccatctggcgccatctacaatgaggcttaagtcgactttgttcccactgtacttttagctcgtacaaaatacaatatacttttcatttctccgtaaacaacatgttttcccatgtaatatccttttctatttttcgttccgttaccaactttacacatactttatatagctattcacttctatacactaaaaaactaagacaattttaattttgctgcctgccatatttcaatttgttataaattcctataatttatcctattagtagctaaaaaaagatgaatgtgaatcgaatcctaagagaattcccctcgaagatcgatctggcggcccggccggccgcggccgcactcgagatatctagacccagctttcttgtacaaagtggtgatagcttgtcgagaagtactcgagggggggcccggtacccaattcgccctatagtgagtcgtattacgcgcgctcactggccgtcgttttacaacgtcgtgactgggaaaaccctggcgttacccaacttaatcgccttgcagcacatccccctttcgccagctggcgtaatagcgaagaggcccgcaccgatcgcccttcccaacagttgcgcagcctgaatggcgaatggacgcgccctgtagcggcgcattaagcgcggcgggtgtggtggttacgcgcagcgtgaccgctacacttgccagcgccctagcgcccgctcctttcgctttcttcccttcctttctcgccacgttcgccggctttccccgtcaagctctaaatcgggggctccctttagggttccgatttagtgctttacggcacctcgaccccaaaaaacttgattagggtgatggttcacgtagtgggccatcgccctgatagacggtttttcgccctttgacgttggagtccacgttctttaatagtggactcttgttccaaactggaacaacactcaaccctatctcggtctattcttttgatttataagggattttgccgatttcggcctattggttaaaaaatgagctgatttaacaaaaatttaacgcgaattttaacaaaatattaacgcttacaatttcctgatgcggtattttctccttacgcatctgtgcggtatttcacaccgcatagggtaataactgatataattaaattgaagctctaatttgtgagtttagtatacatgcatttacttataatacagttttttagttttgctggccgcatcttctcaaatatgcttcccagcctgcttttctgtaacgttcaccctctaccttagcatcccttccctttgcaaatagtcctcttccaacaataataatgtcagatcctgtagagaccacatcatccacggttctatactgttgacccaatgcgtctcccttgtcatctaaacccacaccgggtgtcataatcaaccaatcgtaaccttcatctcttccacccatgtctctttgagcaataaagccgataacaaaatctttgtcgctcttcgcaatgtcaacagtacccttagtatattctccagtagatagggagcccttgcatgacaattctgctaacatcaaaaggcctctaggttcctttgttacttcttctgccgcctgcttcaaaccgctaacaatacctgggcccaccacaccgtgtgcattcgtaatgtctgcccattctgctattctgtatacacccgcagagtactgcaatttgactgtattaccaatgtcagcaaattttctgtcttcgaagagtaaaaaattgtacttggcggataatgcctttagcggcttaactgtgccctccatggaaaaatcagtcaagatatccacatgtgtttttagtaaacaaattttgggacctaatgcttcaactaactccagtaattccttggtggtacgaacatccaatgaagcacacaagtttgtttgcttttcgtgcatgatattaaatagcttggcagcaacaggactaggatgagtagcagcacgttccttatatgtagctttcgacatgatttatcttcgtttcctgcaggtttttgttctgtgcagttgggttaagaatactgggcaatttcatgtttcttcaacactacatatgcgtatatataccaatctaagtctgtgctccttccttcgttcttccttctgttcggagattaccgaatcaaaaaaatttcaaggaaaccgaaatcaaaaaaaagaataaaaaaaaaatgatgaattgaaaaggtggtatggtgcactctcagtacaatctgctctgatgccgcatagttaagccagccccgacacccgccaacacccgctgacgcgccctgacgggcttgtctgctcccggcatccgcttacagacaagctgtgaccgtctccgggagctgcatgtgtcagaggttttcaccgtcatcaccgaaacgcgcga

SEQ ID NO: 3922 - RNA, 10311 nt, Saccharomyces cerevisiae
  source 1..10311: mol_type = other RNA
gacgaaagggcctcgtgatacgcctatttttataggttaatgtcatgataataatggtttcttagtatgatccaatatcaaaggaaatgatagcattgaaggatgagactaatccaattgaggagtggcagcatatagaacagctaaagggtagtgctgaaggaagcatacgataccccgcatggaatgggataatatcacaggaggtactagactacctttcatcctacataaatagacgcatataagtacgcatttaagcataaacacgcactatgccgttcttctcatgtatatatatatacaggcaacacgcagatataggtgcgacgtgaacagtgagctgtatgtgcgcagctcgcgttgcattttcggaagcgctcgttttcggaaacgctttgaagttcctattccgaagttcctattctctagaaagtataggaacttcagagcgcttttgaaaaccaaaagcgctctgaagacgcactttcaaaaaaccaaaaacgcaccggactgtaacgagctactaaaatattgcgaataccgcttccacaaacattgctcaaaagtatctctttgctatatatctctgtgctatatccctatataacctacccatccacctttcgctccttgaacttgcatctaaactcgacctctacattttttatgtttatctctagtattactctttagacaaaaaaattgtagtaagaactattcatagagtgaatcgaaaacaatacgaaaatgtaaacatttcctatacgtagtatatagagacaaaatagaagaaaccgttcataattttctgaccaatgaagaatcatcaacgctatcactttctgttcacaaagtatgcgcaatccacatcggtatagaatataatcggggatgcctttatcttgaaaaaatgcacccgcagcttcgctagtaatcagtaaacgcgggaagtggagtcaggctttttttatggaagagaaaatagacaccaaagtagccttcttctaaccttaacggacctacagtgcaaaaagttatcaagagactgcattatagagcgcacaaaggagaaaaaaagtaatctaagatgctttgttagaaaaatagcgctctcgggatgcatttttgtagaacaaaaaagaagtatagattctttgttggtaaaatagcgctctcgcgttgcatttctgttctgtaaaaatgcagctcagattctttgtttgaaaaattagcgctctcgcgttgcatttttgttttacaaaaatgaagcacagattcttcgttggtaaaatagcgctttcgcgttgcatttctgttctgtaaaaatgcagctcagattctttgtttgaaaaattagcgctctcgcgttgcatttttgttctacaaaatgaagcacagatgcttcgttcaggtggcacttttcggggaaatgtgcgcggaacccctatttgtttatttttctaaatacattcaaatatgtatccgctcatgagacaataaccctgataaatgcttcaataatattgaaaaaggaagagtatgagtattcaacatttccgtgtcgcccttattcccttttttgcggcattttgccttcctgtttttgctcacccagaaacgctggtgaaagtaaaagatgctgaagatcagttgggtgcacgagtgggttacatcgaactggatctcaacagcggtaagatccttgagagttttcgccccgaagaacgttttccaatgatgagcacttttaaagttctgctatgtggcgcggtattatcccgtattgacgccgggcaagagcaactcggtcgccgcatacactattctcagaatgacttggttgagtactcaccagtcacagaaaagcatcttacggatggcatgacagtaagagaattatgcagtgctgccataaccatgagtgataacactgcggccaacttacttctgacaacgatcggaggaccgaaggagctaaccgcttttttgcacaacatgggggatcatgtaactcgccttgatcgttgggaaccggagctgaatgaagccataccaaacgacgagcgtgacaccacgatgcctgtagcaatggcaacaacgttgcgcaaactattaactggcgaactacttactctagcttcccggcaacaattaatagactggatggaggcggataaagttgcaggaccacttctgcgctcggcccttccggctggctggtttattgctgataaatctggagccggtgagcgtgggtctcgcggtatcattgcagcactggggccagatggtaagccctcccgtatcgtagttatctacacgacggggagtcaggcaactatggatgaacgaaatagacagatcgctgagataggtgcctcactgattaagcattggtaactgtcagaccaagtttactcatatatactttagattgatttaaaacttcatttttaatttaaaaggatctaggtgaagatcctttttgataatctcatgaccaaaatcccttaacgtgagttttcgttccactgagcgtcagaccccgtagaaaagatcaaaggatcttcttgagatcctttttttctgcgcgtaatctgctgcttgcaaacaaaaaaaccaccgctaccagcggtggtttgtttgccggatcaagagctaccaactctttttccgaaggtaactggcttcagcagagcgcagataccaaatactgttcttctagtgtagccgtagttaggccaccacttcaagaactctgtagcaccgcctacatacctcgctctgctaatcctgttaccagtggctgctgccagtggcgataagtcgtgtcttaccgggttggactcaagacgatagttaccggataaggcgcagcggtcgggctgaacggggggttcgtgcacacagcccagcttggagcgaacgacctacaccgaactgagatacctacagcgtgagctatgagaaagcgccacgcttcccgaagggagaaaggcggacaggtatccggtaagcggcagggtcggaacaggagagcgcacgagggagcttccagggggaaacgcctggtatctttatagtcctgtcgggtttcgccacctctgacttgagcgtcgatttttgtgatgctcgtcaggggggcggagcctatggaaaaacgccagcaacgcggcctttttacggttcctggccttttgctggccttttgctcacatgttctttcctgcgttatcccctgattctgtggataaccgtattaccgcctttgagtgagctgataccgctcgccgcagccgaacgaccgagcgcagcgagtcagtgagcgaggaagcggaagagcgcccaatacgcaaaccgcctctccccgcgcgttggccgattcattaatgcagctggcacgacaggtttcccgactggaaagcgggcagtgagcgcaacgcaattaatgtgagttagctcactcattaggcaccccaggctttacactttatgcttccggctcgtatgttgtgtggaattgtgagcggataacaatttcacacaggaaacagctatgaccatgattacgccaagcgcgcaattaaccctcactaaagggaacaaaagctggagctccaccgcggtggcggcccccgtcccaccatcgggcgcggatcatcacaagtttgtacaaaaaagcaggctctttggccatataggccaccaggtcctgcaggcgcgctcttcaggaggcgcgccaactgccctcttaattaacgaagaagatcggaccggggccgcggatctttgcaaagatccaaaaaaagcatgcgtacggattagaagccgccgagcgggtgacagccctccgaaggaagactctcctccgtgcgtcctcgtcttcaccggtcgcgttcctgaaacgcagatgtgcctcgcgccgcactgctccgaacaataaagattctacaatactagcttttatggttatgaagaggaaaattggcagtaacctggccccacaaacctcaaatgaacgaatcaaattaacaaccagatatctcgactgaaaaaaaaggtttaaaccagttccctgaaattattcccctacttgactaataagtatataaagacggtaggtattgattgtaattctgtaaatctatttcttaaacttcttgaattctacttttatagttagtcttttttttagttttaaaacaccaagaacttagtttcgaataaacacacataaataaaccatgaaatcttctcaccatcaccatcaccatcaccatcaccatggttcttctatgaaaatcgaagaaggtaaactggtaatctggattaacggcgataaaggctataacggtctcgctgaagtcggtaagaaattcgagaaagataccggaattaaagtcaccgttgagcatccggataaactggaagagaaattcccacaggttgcggcaactggcgatggccctgacattatcttctgggcacacgaccgctttggtggctacgctcaatctggcctgttggctgaaatcaccccggacaaagcgttccaggacaagctgtatccgtttacctgggatgccgtacgttacaacggcaagctgattgcttacccgatcgctgttgaagcgttatcgctgatttataacaaagatctgctgccgaacccgccaaaaacctgggaagagatcccggcgctggataaagaactgaaagcgaaaggtaagagcgcgctgatgttcaacctgcaagaaccgtacttcacctggccgctgattgctgctgacgggggttatgcgttcaagtatgaaaacggcaagtacgacattaaagacgtgggcgtggataacgctggcgcgaaagcgggtctgaccttcctggttgacctgattaaaaacaaacacatgaatgcagacaccgattactccatcgcagaagctgcctttaataaaggcgaaacagcgatgaccatcaacggcccgtgggcatggtccaacatcgacaccagcaaagtgaattatggtgtaacggtactgccgaccttcaagggtcaaccatccaaaccgttcgttggcgtgctgagcgcaggtattaacgccgccagtccgaacaaagagctggcaaaagagttcctcgaaaactatctgctgactgatgaaggtctggaagcggttaataaagacaaaccgctgggtgccgtagcgctgaagtcttacgaggaagagttggcgaaagatccacgtattgccgccactatggaaaacgcccagaaaggtgaaatcatgccgaacatcccgcagatgtccgctttctggtatgccgtgcgtactgcggtgatcaacgccgccagcggtcgtcagactgtcgatgaagccctgaaagacgcgcagactaattcgagctcgaacaacaacaacaataacaataacaacaacctcgggatcgaggaaaacctgtacttccaatccaatgcaaagagaaaacgagaacagatgactttgtggaaagccgcgtttgtcaacgggcaggaaacgttcaagtcctggattgacaaggcacgaatgctggaattgaactgtgacgtctcttctgcaagctcgacacattactctgatctgaacttgaagacaaagtgtgccaagacagacgacaaatttatgtgtaattattctgtctgcatacgaccgacttctaagcagaagcgaacgttgaaccagatgctcaaggtgagcaactatgcttacaattggtgcaattacctagttaaggagaaagacttcaaaccgaagcagttcgacttgcaaagaattgtcgctaaaacgaattcaacagacgttccggccgaatacaggcttccaggagacgactggtttttcgacaacaagatgtcctctatcaagttgaccgcctgtaagaacttttgcaccatgtacaagtctactcaaaccaaccagaagaaaacaaaggtcgatctcagaaacaaagacattgttcagttacgcgaaggatcgtttgaagttcaaagcaagtacgtgagattgctaacggaaaaagacataccaggcgaacgaattcggcaatcgagaattgctttgatgccagacagtttttcgaaatcaaagaaggactggaaagaaaggtttctcaggctttcgaaaaatgtatctaagataccacctttgagtcacgacatgaaggtatgcaaacgtccgaatgggaaattcatactgcagatttcatgcgatccaatatgtactcgacagatacaagtgcaaacttcagattcgatatgttcaatcgatccgggaggcaggacttttgcgacatgctatgatcctagcaatataaagacatttcagatcggacccgaggcagacaaaaaggaaatcattcacgaatttcacaacaagatcgattatgttcaccgtctcttgtcgcatgctcaggagaaaaagcagacgcaagcggtgcaagacagaatcggacaactgaagaagctgcacctcaaactgaaaacgtacgtcgacgacgtgcacttgaaattgtgctcgtacctggtcaagaactacaaactggtcgttctcggcaagatatcggtttcgtccatcgtgagaaaagacaggccgaaccatcttgccaaaagcgctaacagggacttgctctgttggcagcactacagattcagacagagattgttacacagagtccgtggcacggactgcgaagtgatcatacaagacgaacgttacacttccaagacctgtggtaattgcggtgagaagaacaacaaactcggtggaaaggaaacgtttacttgtgaaagttgcaattacaaaactcatcgagacgtcaacggagcgagaaacattctgtgcaaatacttgggactttttccatttgcagcgtaacgaaagaaaaatgacaattaattgttcgggttcgattctatccccagggctcgaatgcatttttgtcacagattttgccaatgcaagatctgggggcaagaatgtctccgggtgaaaagagtcaggctggaaagattacggggacaggtgctcaaacgcctttccattttcggtatatataaaaacacaatgctttgacatttctcatgtatcatcgttttgaattacaagaggtttctgccgtattggacaaaatcatacaaagccagtgatgccatcatacattagctttcctatttaaaaaaactcgaatgtggacagtgttggcaaatttgtccaggtatacacaaatgcaatgttttgaaattccttatactatcatcacactgtcataggagaagtttctccctacattggacgctgaagtagaatgactttgctatcagacaagtagtaaaaaaatgttcaacaatatgtaatgcattactaatacaggagaaaattccaacataatgttgtttgttttccttctgatcgaaatttggaaaaagttagcagcaggatagtgagaaaatgataactatcctgtgacgcatcgggacaaaattccaacatgtagtacagtatgagatcggtaacatggatagacattcgatgcccttccccgtacatctaactgcggcgtccggacagttaggcaaccaaagagtgtattcgcacatctcattagaggaacgtcgtgcttccctttggcggggcaagagcatttaatccctgtccatgaatcctcgcagcgtcgggttaagcaattccctataccggcttcgctgcctcgccaaatatagagtcgggtcgttacaaccagcattacacttaacccatgccgatcagaaatccaaacaagagaggaaaaaatgctcaacaccatgtaaggactaggaaaaaattccaacatcatactattgcatcgaaaagcatttcaaatctctgagtaacgtttgcttaagtcgactttgttcccactgtacttttagctcgtacaaaatacaatatacttttcatttctccgtaaacaacatgttttcccatgtaatatccttttctatttttcgttccgttaccaactttacacatactttatatagctattcacttctatacactaaaaaactaagacaattttaattttgctgcctgccatatttcaatttgttataaattcctataatttatcctattagtagctaaaaaaagatgaatgtgaatcgaatcctaagagaattcccctcgaagatcgatctggcggcccggccggccgcggccgcactcgagatatctagacccagctttcttgtacaaagtggtgatagcttgtcgagaagtactcgagggggggcccggtacccaattcgccctatagtgagtcgtattacgcgcgctcactggccgtcgttttacaacgtcgtgactgggaaaaccctggcgttacccaacttaatcgccttgcagcacatccccctttcgccagctggcgtaatagcgaagaggcccgcaccgatcgcccttcccaacagttgcgcagcctgaatggcgaatggacgcgccctgtagcggcgcattaagcgcggcgggtgtggtggttacgcgcagcgtgaccgctacacttgccagcgccctagcgcccgctcctttcgctttcttcccttcctttctcgccacgttcgccggctttccccgtcaagctctaaatcgggggctccctttagggttccgatttagtgctttacggcacctcgaccccaaaaaacttgattagggtgatggttcacgtagtgggccatcgccctgatagacggtttttcgccctttgacgttggagtccacgttctttaatagtggactcttgttccaaactggaacaacactcaaccctatctcggtctattcttttgatttataagggattttgccgatttcggcctattggttaaaaaatgagctgatttaacaaaaatttaacgcgaattttaacaaaatattaacgcttacaatttcctgatgcggtattttctccttacgcatctgtgcggtatttcacaccgcatagggtaataactgatataattaaattgaagctctaatttgtgagtttagtatacatgcatttacttataatacagttttttagttttgctggccgcatcttctcaaatatgcttcccagcctgcttttctgtaacgttcaccctctaccttagcatcccttccctttgcaaatagtcctcttccaacaataataatgtcagatcctgtagagaccacatcatccacggttctatactgttgacccaatgcgtctcccttgtcatctaaacccacaccgggtgtcataatcaaccaatcgtaaccttcatctcttccacccatgtctctttgagcaataaagccgataacaaaatctttgtcgctcttcgcaatgtcaacagtacccttagtatattctccagtagatagggagcccttgcatgacaattctgctaacatcaaaaggcctctaggttcctttgttacttcttctgccgcctgcttcaaaccgctaacaatacctgggcccaccacaccgtgtgcattcgtaatgtctgcccattctgctattctgtatacacccgcagagtactgcaatttgactgtattaccaatgtcagcaaattttctgtcttcgaagagtaaaaaattgtacttggcggataatgcctttagcggcttaactgtgccctccatggaaaaatcagtcaagatatccacatgtgtttttagtaaacaaattttgggacctaatgcttcaactaactccagtaattccttggtggtacgaacatccaatgaagcacacaagtttgtttgcttttcgtgcatgatattaaatagcttggcagcaacaggactaggatgagtagcagcacgttccttatatgtagctttcgacatgatttatcttcgtttcctgcaggtttttgttctgtgcagttgggttaagaatactgggcaatttcatgtttcttcaacactacatatgcgtatatataccaatctaagtctgtgctccttccttcgttcttccttctgttcggagattaccgaatcaaaaaaatttcaaggaaaccgaaatcaaaaaaaagaataaaaaaaaaatgatgaattgaaaaggtggtatggtgcactctcagtacaatctgctctgatgccgcatagttaagccagccccgacacccgccaacacccgctgacgcgccctgacgggcttgtctgctcccggcatccgcttacagacaagctgtgaccgtctccgggagctgcatgtgtcagaggttttcaccgtcatcaccgaaacgcgcga

SEQ ID NO: 3923 - RNA, 10311 nt, Saccharomyces cerevisiae
  source 1..10311: mol_type = other RNA
gacgaaagggcctcgtgatacgcctatttttataggttaatgtcatgataataatggtttcttagtatgatccaatatcaaaggaaatgatagcattgaaggatgagactaatccaattgaggagtggcagcatatagaacagctaaagggtagtgctgaaggaagcatacgataccccgcatggaatgggataatatcacaggaggtactagactacctttcatcctacataaatagacgcatataagtacgcatttaagcataaacacgcactatgccgttcttctcatgtatatatatatacaggcaacacgcagatataggtgcgacgtgaacagtgagctgtatgtgcgcagctcgcgttgcattttcggaagcgctcgttttcggaaacgctttgaagttcctattccgaagttcctattctctagaaagtataggaacttcagagcgcttttgaaaaccaaaagcgctctgaagacgcactttcaaaaaaccaaaaacgcaccggactgtaacgagctactaaaatattgcgaataccgcttccacaaacattgctcaaaagtatctctttgctatatatctctgtgctatatccctatataacctacccatccacctttcgctccttgaacttgcatctaaactcgacctctacattttttatgtttatctctagtattactctttagacaaaaaaattgtagtaagaactattcatagagtgaatcgaaaacaatacgaaaatgtaaacatttcctatacgtagtatatagagacaaaatagaagaaaccgttcataattttctgaccaatgaagaatcatcaacgctatcactttctgttcacaaagtatgcgcaatccacatcggtatagaatataatcggggatgcctttatcttgaaaaaatgcacccgcagcttcgctagtaatcagtaaacgcgggaagtggagtcaggctttttttatggaagagaaaatagacaccaaagtagccttcttctaaccttaacggacctacagtgcaaaaagttatcaagagactgcattatagagcgcacaaaggagaaaaaaagtaatctaagatgctttgttagaaaaatagcgctctcgggatgcatttttgtagaacaaaaaagaagtatagattctttgttggtaaaatagcgctctcgcgttgcatttctgttctgtaaaaatgcagctcagattctttgtttgaaaaattagcgctctcgcgttgcatttttgttttacaaaaatgaagcacagattcttcgttggtaaaatagcgctttcgcgttgcatttctgttctgtaaaaatgcagctcagattctttgtttgaaaaattagcgctctcgcgttgcatttttgttctacaaaatgaagcacagatgcttcgttcaggtggcacttttcggggaaatgtgcgcggaacccctatttgtttatttttctaaatacattcaaatatgtatccgctcatgagacaataaccctgataaatgcttcaataatattgaaaaaggaagagtatgagtattcaacatttccgtgtcgcccttattcccttttttgcggcattttgccttcctgtttttgctcacccagaaacgctggtgaaagtaaaagatgctgaagatcagttgggtgcacgagtgggttacatcgaactggatctcaacagcggtaagatccttgagagttttcgccccgaagaacgttttccaatgatgagcacttttaaagttctgctatgtggcgcggtattatcccgtattgacgccgggcaagagcaactcggtcgccgcatacactattctcagaatgacttggttgagtactcaccagtcacagaaaagcatcttacggatggcatgacagtaagagaattatgcagtgctgccataaccatgagtgataacactgcggccaacttacttctgacaacgatcggaggaccgaaggagctaaccgcttttttgcacaacatgggggatcatgtaactcgccttgatcgttgggaaccggagctgaatgaagccataccaaacgacgagcgtgacaccacgatgcctgtagcaatggcaacaacgttgcgcaaactattaactggcgaactacttactctagcttcccggcaacaattaatagactggatggaggcggataaagttgcaggaccacttctgcgctcggcccttccggctggctggtttattgctgataaatctggagccggtgagcgtgggtctcgcggtatcattgcagcactggggccagatggtaagccctcccgtatcgtagttatctacacgacggggagtcaggcaactatggatgaacgaaatagacagatcgctgagataggtgcctcactgattaagcattggtaactgtcagaccaagtttactcatatatactttagattgatttaaaacttcatttttaatttaaaaggatctaggtgaagatcctttttgataatctcatgaccaaaatcccttaacgtgagttttcgttccactgagcgtcagaccccgtagaaaagatcaaaggatcttcttgagatcctttttttctgcgcgtaatctgctgcttgcaaacaaaaaaaccaccgctaccagcggtggtttgtttgccggatcaagagctaccaactctttttccgaaggtaactggcttcagcagagcgcagataccaaatactgttcttctagtgtagccgtagttaggccaccacttcaagaactctgtagcaccgcctacatacctcgctctgctaatcctgttaccagtggctgctgccagtggcgataagtcgtgtcttaccgggttggactcaagacgatagttaccggataaggcgcagcggtcgggctgaacggggggttcgtgcacacagcccagcttggagcgaacgacctacaccgaactgagatacctacagcgtgagctatgagaaagcgccacgcttcccgaagggagaaaggcggacaggtatccggtaagcggcagggtcggaacaggagagcgcacgagggagcttccagggggaaacgcctggtatctttatagtcctgtcgggtttcgccacctctgacttgagcgtcgatttttgtgatgctcgtcaggggggcggagcctatggaaaaacgccagcaacgcggcctttttacggttcctggccttttgctggccttttgctcacatgttctttcctgcgttatcccctgattctgtggataaccgtattaccgcctttgagtgagctgataccgctcgccgcagccgaacgaccgagcgcagcgagtcagtgagcgaggaagcggaagagcgcccaatacgcaaaccgcctctccccgcgcgttggccgattcattaatgcagctggcacgacaggtttcccgactggaaagcgggcagtgagcgcaacgcaattaatgtgagttagctcactcattaggcaccccaggctttacactttatgcttccggctcgtatgttgtgtggaattgtgagcggataacaatttcacacaggaaacagctatgaccatgattacgccaagcgcgcaattaaccctcactaaagggaacaaaagctggagctccaccgcggtggcggcccccgtcccaccatcgggcgcggatcatcacaagtttgtacaaaaaagcaggctctttggccatataggccaccaggtcctgcaggcgcgctcttcaggaggcgcgccaactgccctcttaattaacgaagaagatcggaccggggccgcggatctttgcaaagatccaaaaaaagcatgcgtacggattagaagccgccgagcgggtgacagccctccgaaggaagactctcctccgtgcgtcctcgtcttcaccggtcgcgttcctgaaacgcagatgtgcctcgcgccgcactgctccgaacaataaagattctacaatactagcttttatggttatgaagaggaaaattggcagtaacctggccccacaaacctcaaatgaacgaatcaaattaacaaccagatatctcgactgaaaaaaaaggtttaaaccagttccctgaaattattcccctacttgactaataagtatataaagacggtaggtattgattgtaattctgtaaatctatttcttaaacttcttgaattctacttttatagttagtcttttttttagttttaaaacaccaagaacttagtttcgaataaacacacataaataaaccatgaaatcttctcaccatcaccatcaccatcaccatcaccatggttcttctatgaaaatcgaagaaggtaaactggtaatctggattaacggcgataaaggctataacggtctcgctgaagtcggtaagaaattcgagaaagataccggaattaaagtcaccgttgagcatccggataaactggaagagaaattcccacaggttgcggcaactggcgatggccctgacattatcttctgggcacacgaccgctttggtggctacgctcaatctggcctgttggctgaaatcaccccggacaaagcgttccaggacaagctgtatccgtttacctgggatgccgtacgttacaacggcaagctgattgcttacccgatcgctgttgaagcgttatcgctgatttataacaaagatctgctgccgaacccgccaaaaacctgggaagagatcccggcgctggataaagaactgaaagcgaaaggtaagagcgcgctgatgttcaacctgcaagaaccgtacttcacctggccgctgattgctgctgacgggggttatgcgttcaagtatgaaaacggcaagtacgacattaaagacgtgggcgtggataacgctggcgcgaaagcgggtctgaccttcctggttgacctgattaaaaacaaacacatgaatgcagacaccgattactccatcgcagaagctgcctttaataaaggcgaaacagcgatgaccatcaacggcccgtgggcatggtccaacatcgacaccagcaaagtgaattatggtgtaacggtactgccgaccttcaagggtcaaccatccaaaccgttcgttggcgtgctgagcgcaggtattaacgccgccagtccgaacaaagagctggcaaaagagttcctcgaaaactatctgctgactgatgaaggtctggaagcggttaataaagacaaaccgctgggtgccgtagcgctgaagtcttacgaggaagagttggcgaaagatccacgtattgccgccactatggaaaacgcccagaaaggtgaaatcatgccgaacatcccgcagatgtccgctttctggtatgccgtgcgtactgcggtgatcaacgccgccagcggtcgtcagactgtcgatgaagccctgaaagacgcgcagactaattcgagctcgaacaacaacaacaataacaataacaacaacctcgggatcgaggaaaacctgtacttccaatccaatgcaaagagaaaacgagaacagatgactttgtggaaagccgcgttcgtcaatggacgggaaacgttcaagtcatggattgacaaggcacgaatgctggaattgaactgtgacatctcttctgcaagctcgacacattactcggatctggatttgaaaagcaagtgtgctaagatagaagacaagtttatgtgtacattttctgtcggcattcgacctacttctaagcaaaaccgaactttgaaccagatgctgaaagtgagcaactacgcctacaattggtgtaatcacctagttaaggagaaagacttcaaacctaagcagttcgacttgcaaagagtggttactaaaacgaattcgcacgacgttccggccgagtacagacttcccggagacgactggtttttcgacaacaagatgtcttctatcaagttgaccgcctgtaagaacttttgcaccatgtacaagtctgctcgaaccaatcagaagaaaacaaaggtcgatctcagaaacaaagacactgctttgttacgcgaaggatcgttcgaagtgcagagacaatacgtgaggttgctaacggaaaaagacataccagacgaacgaattcggcaatcgagaatagccttaatggcagacaacttttcgaaatccaagaaggactggaaagaaaggtttctccgactttcgaaaaatgtgtctaagatacctcctttaaatcacgacatgaaagtgtgcaaacgtccgaacggaaaattcatactgcaaattccatgcgatccaatatgtacgcgacagatacaagtgcacacctcggactcgatatgttccatcgatcctggaggcaggacgttcgcgacgtgctacgatcctagcaatataaagacatttcaaatcggacctgaggcagacaagaaggaaatcattcacaaattccacaacaagatcgataatgttcaccgtctcttgtcatatgctcaaaagaaaaagcagacgcaagcagtgcaagacagaatcggacagctgaagaagctgcacttgaaactgaaaacgtacgtcgatgacgtgcacttgaaactgtgctcgtacctggtcaagaattacaaactggtcgttcttggcaggatatcggtttcgtccatcgtgagaaaagacagaccgaaccatttggccaaaaaaggcaacagggacttgctgtgttggcaacatttcagattcagacagagactgttacatagagttcgtggcacggactgcgaagcgatcgctcaagacgaacggtacacttcaaagacatgtggtaactgtggagtgcaaaacaacaaactgggtggaaatgaaacgtttcattgtaaaagttgcaactacaaaactcacagggacgtcaacggagcgagaaacattctttgcaaatacttgggacattttccatttgctacataaaacaaatgatatttgctttttagggctcgattctttgccttctcgatgcatttattgccacagattttgctaatgcagtttctgaggcaagaatgtgttcgggtaaaaagagttaatgggcaaactatgaaagacttggctctcagttgcaagaaatgctcaaatgcgcttcaaatgaaatcaccattgaaagtgaactacgcaaaacgaatcataattcagggtgacattacatatccatatggatttcagttctgatagaaactattcgtttcaaccgcttgtttgcacaaatttgtgtgcctgtttgttttttgttttcttctcgtttgctaaataaaacatcaaataatgcacttttgtcatagttatgttttccgatcaaaatcatttagtatggaaggtacattcaaaaataaagactaagacgacaattttacatttgataacattgtttatttagttcaatatctagtcagtgaatctcaatttcgaaatgaaccgaatatcactcctgcagaatgggcagtgtctgttattcacaaatgatctaacgatacagtcaacacacattatgtgtccacatggcaccaaggtgatgttcttttcattatacaagcaaatccgacatttcttgaactcttcgatagcttcttgaattcgccgattgatcatatttgttgctcgtgcaaaggtgtccgaaacaaaagtttctaataatcttctgagagcgtcgatatgagcatcttcgtccgcgtctgctaccacgttcagcacatctacgctctgctctgactgtaaagttactcttgacatctctgaaaataaaatgaggagaatgtcagttatgatgtaaaccgatcatactggaatataaaacgatacaacttcaaattcaaatctgtagcgtcttgatatacagtgacaagttctaaaagccaactacgttcaatacataaacgtacctgagtttgaatccagttgtcgttgttgctgtatcgcttaagtcgactttgttcccactgtacttttagctcgtacaaaatacaatatacttttcatttctccgtaaacaacatgttttcccatgtaatatccttttctatttttcgttccgttaccaactttacacatactttatatagctattcacttctatacactaaaaaactaagacaattttaattttgctgcctgccatatttcaatttgttataaattcctataatttatcctattagtagctaaaaaaagatgaatgtgaatcgaatcctaagagaattcccctcgaagatcgatctggcggcccggccggccgcggccgcactcgagatatctagacccagctttcttgtacaaagtggtgatagcttgtcgagaagtactcgagggggggcccggtacccaattcgccctatagtgagtcgtattacgcgcgctcactggccgtcgttttacaacgtcgtgactgggaaaaccctggcgttacccaacttaatcgccttgcagcacatccccctttcgccagctggcgtaatagcgaagaggcccgcaccgatcgcccttcccaacagttgcgcagcctgaatggcgaatggacgcgccctgtagcggcgcattaagcgcggcgggtgtggtggttacgcgcagcgtgaccgctacacttgccagcgccctagcgcccgctcctttcgctttcttcccttcctttctcgccacgttcgccggctttccccgtcaagctctaaatcgggggctccctttagggttccgatttagtgctttacggcacctcgaccccaaaaaacttgattagggtgatggttcacgtagtgggccatcgccctgatagacggtttttcgccctttgacgttggagtccacgttctttaatagtggactcttgttccaaactggaacaacactcaaccctatctcggtctattcttttgatttataagggattttgccgatttcggcctattggttaaaaaatgagctgatttaacaaaaatttaacgcgaattttaacaaaatattaacgcttacaatttcctgatgcggtattttctccttacgcatctgtgcggtatttcacaccgcatagggtaataactgatataattaaattgaagctctaatttgtgagtttagtatacatgcatttacttataatacagttttttagttttgctggccgcatcttctcaaatatgcttcccagcctgcttttctgtaacgttcaccctctaccttagcatcccttccctttgcaaatagtcctcttccaacaataataatgtcagatcctgtagagaccacatcatccacggttctatactgttgacccaatgcgtctcccttgtcatctaaacccacaccgggtgtcataatcaaccaatcgtaaccttcatctcttccacccatgtctctttgagcaataaagccgataacaaaatctttgtcgctcttcgcaatgtcaacagtacccttagtatattctccagtagatagggagcccttgcatgacaattctgctaacatcaaaaggcctctaggttcctttgttacttcttctgccgcctgcttcaaaccgctaacaatacctgggcccaccacaccgtgtgcattcgtaatgtctgcccattctgctattctgtatacacccgcagagtactgcaatttgactgtattaccaatgtcagcaaattttctgtcttcgaagagtaaaaaattgtacttggcggataatgcctttagcggcttaactgtgccctccatggaaaaatcagtcaagatatccacatgtgtttttagtaaacaaattttgggacctaatgcttcaactaactccagtaattccttggtggtacgaacatccaatgaagcacacaagtttgtttgcttttcgtgcatgatattaaatagcttggcagcaacaggactaggatgagtagcagcacgttccttatatgtagctttcgacatgatttatcttcgtttcctgcaggtttttgttctgtgcagttgggttaagaatactgggcaatttcatgtttcttcaacactacatatgcgtatatataccaatctaagtctgtgctccttccttcgttcttccttctgttcggagattaccgaatcaaaaaaatttcaaggaaaccgaaatcaaaaaaaagaataaaaaaaaaatgatgaattgaaaaggtggtatggtgcactctcagtacaatctgctctgatgccgcatagttaagccagccccgacacccgccaacacccgctgacgcgccctgacgggcttgtctgctcccggcatccgcttacagacaagctgtgaccgtctccgggagctgcatgtgtcagaggttttcaccgtcatcaccgaaacgcgcga

SEQ ID NO: 3924 - RNA, 10364 nt, Saccharomyces cerevisiae
  source 1..10364: mol_type = other RNA
gacgaaagggcctcgtgatacgcctatttttataggttaatgtcatgataataatggtttcttagtatgatccaatatcaaaggaaatgatagcattgaaggatgagactaatccaattgaggagtggcagcatatagaacagctaaagggtagtgctgaaggaagcatacgataccccgcatggaatgggataatatcacaggaggtactagactacctttcatcctacataaatagacgcatataagtacgcatttaagcataaacacgcactatgccgttcttctcatgtatatatatatacaggcaacacgcagatataggtgcgacgtgaacagtgagctgtatgtgcgcagctcgcgttgcattttcggaagcgctcgttttcggaaacgctttgaagttcctattccgaagttcctattctctagaaagtataggaacttcagagcgcttttgaaaaccaaaagcgctctgaagacgcactttcaaaaaaccaaaaacgcaccggactgtaacgagctactaaaatattgcgaataccgcttccacaaacattgctcaaaagtatctctttgctatatatctctgtgctatatccctatataacctacccatccacctttcgctccttgaacttgcatctaaactcgacctctacattttttatgtttatctctagtattactctttagacaaaaaaattgtagtaagaactattcatagagtgaatcgaaaacaatacgaaaatgtaaacatttcctatacgtagtatatagagacaaaatagaagaaaccgttcataattttctgaccaatgaagaatcatcaacgctatcactttctgttcacaaagtatgcgcaatccacatcggtatagaatataatcggggatgcctttatcttgaaaaaatgcacccgcagcttcgctagtaatcagtaaacgcgggaagtggagtcaggctttttttatggaagagaaaatagacaccaaagtagccttcttctaaccttaacggacctacagtgcaaaaagttatcaagagactgcattatagagcgcacaaaggagaaaaaaagtaatctaagatgctttgttagaaaaatagcgctctcgggatgcatttttgtagaacaaaaaagaagtatagattctttgttggtaaaatagcgctctcgcgttgcatttctgttctgtaaaaatgcagctcagattctttgtttgaaaaattagcgctctcgcgttgcatttttgttttacaaaaatgaagcacagattcttcgttggtaaaatagcgctttcgcgttgcatttctgttctgtaaaaatgcagctcagattctttgtttgaaaaattagcgctctcgcgttgcatttttgttctacaaaatgaagcacagatgcttcgttcaggtggcacttttcggggaaatgtgcgcggaacccctatttgtttatttttctaaatacattcaaatatgtatccgctcatgagacaataaccctgataaatgcttcaataatattgaaaaaggaagagtatgagtattcaacatttccgtgtcgcccttattcccttttttgcggcattttgccttcctgtttttgctcacccagaaacgctggtgaaagtaaaagatgctgaagatcagttgggtgcacgagtgggttacatcgaactggatctcaacagcggtaagatccttgagagttttcgccccgaagaacgttttccaatgatgagcacttttaaagttctgctatgtggcgcggtattatcccgtattgacgccgggcaagagcaactcggtcgccgcatacactattctcagaatgacttggttgagtactcaccagtcacagaaaagcatcttacggatggcatgacagtaagagaattatgcagtgctgccataaccatgagtgataacactgcggccaacttacttctgacaacgatcggaggaccgaaggagctaaccgcttttttgcacaacatgggggatcatgtaactcgccttgatcgttgggaaccggagctgaatgaagccataccaaacgacgagcgtgacaccacgatgcctgtagcaatggcaacaacgttgcgcaaactattaactggcgaactacttactctagcttcccggcaacaattaatagactggatggaggcggataaagttgcaggaccacttctgcgctcggcccttccggctggctggtttattgctgataaatctggagccggtgagcgtgggtctcgcggtatcattgcagcactggggccagatggtaagccctcccgtatcgtagttatctacacgacggggagtcaggcaactatggatgaacgaaatagacagatcgctgagataggtgcctcactgattaagcattggtaactgtcagaccaagtttactcatatatactttagattgatttaaaacttcatttttaatttaaaaggatctaggtgaagatcctttttgataatctcatgaccaaaatcccttaacgtgagttttcgttccactgagcgtcagaccccgtagaaaagatcaaaggatcttcttgagatcctttttttctgcgcgtaatctgctgcttgcaaacaaaaaaaccaccgctaccagcggtggtttgtttgccggatcaagagctaccaactctttttccgaaggtaactggcttcagcagagcgcagataccaaatactgttcttctagtgtagccgtagttaggccaccacttcaagaactctgtagcaccgcctacatacctcgctctgctaatcctgttaccagtggctgctgccagtggcgataagtcgtgtcttaccgggttggactcaagacgatagttaccggataaggcgcagcggtcgggctgaacggggggttcgtgcacacagcccagcttggagcgaacgacctacaccgaactgagatacctacagcgtgagctatgagaaagcgccacgcttcccgaagggagaaaggcggacaggtatccggtaagcggcagggtcggaacaggagagcgcacgagggagcttccagggggaaacgcctggtatctttatagtcctgtcgggtttcgccacctctgacttgagcgtcgatttttgtgatgctcgtcaggggggcggagcctatggaaaaacgccagcaacgcggcctttttacggttcctggccttttgctggccttttgctcacatgttctttcctgcgttatcccctgattctgtggataaccgtattaccgcctttgagtgagctgataccgctcgccgcagccgaacgaccgagcgcagcgagtcagtgagcgaggaagcggaagagcgcccaatacgcaaaccgcctctccccgcgcgttggccgattcattaatgcagctggcacgacaggtttcccgactggaaagcgggcagtgagcgcaacgcaattaatgtgagttagctcactcattaggcaccccaggctttacactttatgcttccggctcgtatgttgtgtggaattgtgagcggataacaatttcacacaggaaacagctatgaccatgattacgccaagcgcgcaattaaccctcactaaagggaacaaaagctggagctccaccgcggtggcggcccccgtcccaccatcgggcgcggatcatcacaagtttgtacaaaaaagcaggctctttggccatataggccaccaggtcctgcaggcgcgctcttcaggaggcgcgccaactgccctcttaattaacgaagaagatcggaccggggccgcggatctttgcaaagatccaaaaaaagcatgcgtacggattagaagccgccgagcgggtgacagccctccgaaggaagactctcctccgtgcgtcctcgtcttcaccggtcgcgttcctgaaacgcagatgtgcctcgcgccgcactgctccgaacaataaagattctacaatactagcttttatggttatgaagaggaaaattggcagtaacctggccccacaaacctcaaatgaacgaatcaaattaacaaccagatatctcgactgaaaaaaaaggtttaaaccagttccctgaaattattcccctacttgactaataagtatataaagacggtaggtattgattgtaattctgtaaatctatttcttaaacttcttgaattctacttttatagttagtcttttttttagttttaaaacaccaagaacttagtttcgaataaacacacataaataaaccatgaaatcttctcaccatcaccatcaccatcaccatcaccatggttcttctatgaaaatcgaagaaggtaaactggtaatctggattaacggcgataaaggctataacggtctcgctgaagtcggtaagaaattcgagaaagataccggaattaaagtcaccgttgagcatccggataaactggaagagaaattcccacaggttgcggcaactggcgatggccctgacattatcttctgggcacacgaccgctttggtggctacgctcaatctggcctgttggctgaaatcaccccggacaaagcgttccaggacaagctgtatccgtttacctgggatgccgtacgttacaacggcaagctgattgcttacccgatcgctgttgaagcgttatcgctgatttataacaaagatctgctgccgaacccgccaaaaacctgggaagagatcccggcgctggataaagaactgaaagcgaaaggtaagagcgcgctgatgttcaacctgcaagaaccgtacttcacctggccgctgattgctgctgacgggggttatgcgttcaagtatgaaaacggcaagtacgacattaaagacgtgggcgtggataacgctggcgcgaaagcgggtctgaccttcctggttgacctgattaaaaacaaacacatgaatgcagacaccgattactccatcgcagaagctgcctttaataaaggcgaaacagcgatgaccatcaacggcccgtgggcatggtccaacatcgacaccagcaaagtgaattatggtgtaacggtactgccgaccttcaagggtcaaccatccaaaccgttcgttggcgtgctgagcgcaggtattaacgccgccagtccgaacaaagagctggcaaaagagttcctcgaaaactatctgctgactgatgaaggtctggaagcggttaataaagacaaaccgctgggtgccgtagcgctgaagtcttacgaggaagagttggcgaaagatccacgtattgccgccactatggaaaacgcccagaaaggtgaaatcatgccgaacatcccgcagatgtccgctttctggtatgccgtgcgtactgcggtgatcaacgccgccagcggtcgtcagactgtcgatgaagccctgaaagacgcgcagactaattcgagctcgaacaacaacaacaataacaataacaacaacctcgggatcgaggaaaacctgtacttccaatccaatgcaaaacgcaaacgagaggatttaacactatgggatgctgcaaacgtccacaaacacaaaagtatgtggtattggtgggagtacattagaaggaaagatctaataaatcatgagaaaactgattgcgatgtaattcaattgttacagtctgcaagtgtcaaaaagcaaaagacacattcagatgattttttaacgtctttctcggttggaattcgtcctactaaacatcaaaaacaagtccttaacgaaatgcttcgcgtttcaaattatacgtataactggtgcttgtggttagtaaacgaaaaaggtttaagaccacaccaattcgagctacagaaaattgtttgcaaaacaaatgctagggatgtggatccgcagtacaggatggaaaacgatgattggttcttcaacaacaaaatgactagagtaaagggaacatcatgcaaaaatttttgtacatcttacaagtcggctaaggctcttaaatcaaaactaaaacgaccaatgcctatttcaaatatcattgaaggatcttttggggttccaaatctttacataagattgctttcatctaaagacgtttgcacacatgaaaccaacatgcaaaacagatacatctgtatgatgccggacaattttgaaaagcgttcaaatcctaaagaacgattcctaaaattggctaaacgaataacaaacattcctcctataaatcacgatgtaaaaattgtcaagcgtgctgatggcatgtttatcatgaatattccttgtgatcctaagtatacaagaagaaatgcatcaaacgatacgatagagaaacgtgtgtgtggtattgatcctggtggtagaacgtttgctacagtatatgaccctattgactgttgtgttttccaagttggtattaaagaagacaagcagtatgtgattagtaaactccacaataaaattgatcatgcgcatatgcatttgacaaaagcgcaaaacaaaaagcaacaacaagcagcacgtgaacgaattgtatcactgaagaaaacacatttgaaactaaaaacgtttgtagaagatattcaccttaagctttcttcacatcttgtcaaagagtatcattatgttgcactgggtaaaatcaacgtcgcgccaatggtaaagaaaaaacatttatcgaaacgagctaaaagggatttgctatactggcagcattacagatttcgccaaaggctaactcaccgaaccaccaacaccgactgcatatttgaggttcaaaatgaagcatacacttcgaagacctgtggagtgtgtggcaaaatcaacgaaaatcttgaaaagagtgaaacattttattgtgatcagtgcaaatataacacacatagagacgtcaatggtgcaagaaacattttgctcaaatcattgaacatgtttccgtttgaaaagaaacaacaataactctgtaataattaggtcgatccatcctaagttcgaaagttgattgctgggcaattttctgccgaatgatatgggttatgacactacgttagtgattgtgtgtcataggtgcaaaaactttttttcgatggtgaacttttgccgtagatgcgaggccctcagctgtgtgtcatgtacgcggatcgacgatcgctgcgaatggtgtggcgaaattcagggttacggccaaaacagaggagtgaggcttttgcatctgtgatggactgatcgagtggactatgtgggctgatctagtggactatgtaaactgttgtacgttgttgttgcgaaagattgaatgtttgaaatattgattgttgcagaataaaatcgtttgaaactacatatacatagttgtttgtatttgattttagtagagttgggtaatatagatatgagaaaacatacgacactgggttatatcaataactaacgcaatagagaaatcaaacattcgtgcacacaatagtagtttttcaactttgcgtttggtagttgcatgaataagtatatgttactacaagaataagaacaaaacgaattgaacggttcatgatatttatttacaacacgatcatacaaaacctactcatgtgtctatcaatagtcttgttcctggacccaccattcgcaaaaactggcaattcggtgaatgtttatggtgttccaagaacgcatcgtctgtagatttccaatgatacaacacaatgccacaacgaaaacatttgcaacgatcgtgttgtcccaagtagtacaacccgcacgaagcaagctggtatttgtttggctgtatttggggcgaccaatgctcaaaagttttcagtctatcgatatagttttccatgtacatacttgtttgatacgtgcagaaagcgtcggtatcatccattatatgatatgatattatattacacatgcaattggttatttcaacatctttatatattttttgtctcaaaaatactcttggtcaaacgttacgagttttgttctcttggcttttgagctcaagcttaagtcgactttgttcccactgtacttttagctcgtacaaaatacaatatacttttcatttctccgtaaacaacatgttttcccatgtaatatccttttctatttttcgttccgttaccaactttacacatactttatatagctattcacttctatacactaaaaaactaagacaattttaattttgctgcctgccatatttcaatttgttataaattcctataatttatcctattagtagctaaaaaaagatgaatgtgaatcgaatcctaagagaattcccctcgaagatcgatctggcggcccggccggccgcggccgcactcgagatatctagacccagctttcttgtacaaagtggtgatagcttgtcgagaagtactcgagggggggcccggtacccaattcgccctatagtgagtcgtattacgcgcgctcactggccgtcgttttacaacgtcgtgactgggaaaaccctggcgttacccaacttaatcgccttgcagcacatccccctttcgccagctggcgtaatagcgaagaggcccgcaccgatcgcccttcccaacagttgcgcagcctgaatggcgaatggacgcgccctgtagcggcgcattaagcgcggcgggtgtggtggttacgcgcagcgtgaccgctacacttgccagcgccctagcgcccgctcctttcgctttcttcccttcctttctcgccacgttcgccggctttccccgtcaagctctaaatcgggggctccctttagggttccgatttagtgctttacggcacctcgaccccaaaaaacttgattagggtgatggttcacgtagtgggccatcgccctgatagacggtttttcgccctttgacgttggagtccacgttctttaatagtggactcttgttccaaactggaacaacactcaaccctatctcggtctattcttttgatttataagggattttgccgatttcggcctattggttaaaaaatgagctgatttaacaaaaatttaacgcgaattttaacaaaatattaacgcttacaatttcctgatgcggtattttctccttacgcatctgtgcggtatttcacaccgcatagggtaataactgatataattaaattgaagctctaatttgtgagtttagtatacatgcatttacttataatacagttttttagttttgctggccgcatcttctcaaatatgcttcccagcctgcttttctgtaacgttcaccctctaccttagcatcccttccctttgcaaatagtcctcttccaacaataataatgtcagatcctgtagagaccacatcatccacggttctatactgttgacccaatgcgtctcccttgtcatctaaacccacaccgggtgtcataatcaaccaatcgtaaccttcatctcttccacccatgtctctttgagcaataaagccgataacaaaatctttgtcgctcttcgcaatgtcaacagtacccttagtatattctccagtagatagggagcccttgcatgacaattctgctaacatcaaaaggcctctaggttcctttgttacttcttctgccgcctgcttcaaaccgctaacaatacctgggcccaccacaccgtgtgcattcgtaatgtctgcccattctgctattctgtatacacccgcagagtactgcaatttgactgtattaccaatgtcagcaaattttctgtcttcgaagagtaaaaaattgtacttggcggataatgcctttagcggcttaactgtgccctccatggaaaaatcagtcaagatatccacatgtgtttttagtaaacaaattttgggacctaatgcttcaactaactccagtaattccttggtggtacgaacatccaatgaagcacacaagtttgtttgcttttcgtgcatgatattaaatagcttggcagcaacaggactaggatgagtagcagcacgttccttatatgtagctttcgacatgatttatcttcgtttcctgcaggtttttgttctgtgcagttgggttaagaatactgggcaatttcatgtttcttcaacactacatatgcgtatatataccaatctaagtctgtgctccttccttcgttcttccttctgttcggagattaccgaatcaaaaaaatttcaaggaaaccgaaatcaaaaaaaagaataaaaaaaaaatgatgaattgaaaaggtggtatggtgcactctcagtacaatctgctctgatgccgcatagttaagccagccccgacacccgccaacacccgctgacgcgccctgacgggcttgtctgctcccggcatccgcttacagacaagctgtgaccgtctccgggagctgcatgtgtcagaggttttcaccgtcatcaccgaaacgcgcga

SEQ ID NO: 3925 - RNA, 10556 nt, Saccharomyces cerevisiae
  source 1..10556: mol_type = other RNA
gacgaaagggcctcgtgatacgcctatttttataggttaatgtcatgataataatggtttcttagtatgatccaatatcaaaggaaatgatagcattgaaggatgagactaatccaattgaggagtggcagcatatagaacagctaaagggtagtgctgaaggaagcatacgataccccgcatggaatgggataatatcacaggaggtactagactacctttcatcctacataaatagacgcatataagtacgcatttaagcataaacacgcactatgccgttcttctcatgtatatatatatacaggcaacacgcagatataggtgcgacgtgaacagtgagctgtatgtgcgcagctcgcgttgcattttcggaagcgctcgttttcggaaacgctttgaagttcctattccgaagttcctattctctagaaagtataggaacttcagagcgcttttgaaaaccaaaagcgctctgaagacgcactttcaaaaaaccaaaaacgcaccggactgtaacgagctactaaaatattgcgaataccgcttccacaaacattgctcaaaagtatctctttgctatatatctctgtgctatatccctatataacctacccatccacctttcgctccttgaacttgcatctaaactcgacctctacattttttatgtttatctctagtattactctttagacaaaaaaattgtagtaagaactattcatagagtgaatcgaaaacaatacgaaaatgtaaacatttcctatacgtagtatatagagacaaaatagaagaaaccgttcataattttctgaccaatgaagaatcatcaacgctatcactttctgttcacaaagtatgcgcaatccacatcggtatagaatataatcggggatgcctttatcttgaaaaaatgcacccgcagcttcgctagtaatcagtaaacgcgggaagtggagtcaggctttttttatggaagagaaaatagacaccaaagtagccttcttctaaccttaacggacctacagtgcaaaaagttatcaagagactgcattatagagcgcacaaaggagaaaaaaagtaatctaagatgctttgttagaaaaatagcgctctcgggatgcatttttgtagaacaaaaaagaagtatagattctttgttggtaaaatagcgctctcgcgttgcatttctgttctgtaaaaatgcagctcagattctttgtttgaaaaattagcgctctcgcgttgcatttttgttttacaaaaatgaagcacagattcttcgttggtaaaatagcgctttcgcgttgcatttctgttctgtaaaaatgcagctcagattctttgtttgaaaaattagcgctctcgcgttgcatttttgttctacaaaatgaagcacagatgcttcgttcaggtggcacttttcggggaaatgtgcgcggaacccctatttgtttatttttctaaatacattcaaatatgtatccgctcatgagacaataaccctgataaatgcttcaataatattgaaaaaggaagagtatgagtattcaacatttccgtgtcgcccttattcccttttttgcggcattttgccttcctgtttttgctcacccagaaacgctggtgaaagtaaaagatgctgaagatcagttgggtgcacgagtgggttacatcgaactggatctcaacagcggtaagatccttgagagttttcgccccgaagaacgttttccaatgatgagcacttttaaagttctgctatgtggcgcggtattatcccgtattgacgccgggcaagagcaactcggtcgccgcatacactattctcagaatgacttggttgagtactcaccagtcacagaaaagcatcttacggatggcatgacagtaagagaattatgcagtgctgccataaccatgagtgataacactgcggccaacttacttctgacaacgatcggaggaccgaaggagctaaccgcttttttgcacaacatgggggatcatgtaactcgccttgatcgttgggaaccggagctgaatgaagccataccaaacgacgagcgtgacaccacgatgcctgtagcaatggcaacaacgttgcgcaaactattaactggcgaactacttactctagcttcccggcaacaattaatagactggatggaggcggataaagttgcaggaccacttctgcgctcggcccttccggctggctggtttattgctgataaatctggagccggtgagcgtgggtctcgcggtatcattgcagcactggggccagatggtaagccctcccgtatcgtagttatctacacgacggggagtcaggcaactatggatgaacgaaatagacagatcgctgagataggtgcctcactgattaagcattggtaactgtcagaccaagtttactcatatatactttagattgatttaaaacttcatttttaatttaaaaggatctaggtgaagatcctttttgataatctcatgaccaaaatcccttaacgtgagttttcgttccactgagcgtcagaccccgtagaaaagatcaaaggatcttcttgagatcctttttttctgcgcgtaatctgctgcttgcaaacaaaaaaaccaccgctaccagcggtggtttgtttgccggatcaagagctaccaactctttttccgaaggtaactggcttcagcagagcgcagataccaaatactgttcttctagtgtagccgtagttaggccaccacttcaagaactctgtagcaccgcctacatacctcgctctgctaatcctgttaccagtggctgctgccagtggcgataagtcgtgtcttaccgggttggactcaagacgatagttaccggataaggcgcagcggtcgggctgaacggggggttcgtgcacacagcccagcttggagcgaacgacctacaccgaactgagatacctacagcgtgagctatgagaaagcgccacgcttcccgaagggagaaaggcggacaggtatccggtaagcggcagggtcggaacaggagagcgcacgagggagcttccagggggaaacgcctggtatctttatagtcctgtcgggtttcgccacctctgacttgagcgtcgatttttgtgatgctcgtcaggggggcggagcctatggaaaaacgccagcaacgcggcctttttacggttcctggccttttgctggccttttgctcacatgttctttcctgcgttatcccctgattctgtggataaccgtattaccgcctttgagtgagctgataccgctcgccgcagccgaacgaccgagcgcagcgagtcagtgagcgaggaagcggaagagcgcccaatacgcaaaccgcctctccccgcgcgttggccgattcattaatgcagctggcacgacaggtttcccgactggaaagcgggcagtgagcgcaacgcaattaatgtgagttagctcactcattaggcaccccaggctttacactttatgcttccggctcgtatgttgtgtggaattgtgagcggataacaatttcacacaggaaacagctatgaccatgattacgccaagcgcgcaattaaccctcactaaagggaacaaaagctggagctccaccgcggtggcggcccccgtcccaccatcgggcgcggatcatcacaagtttgtacaaaaaagcaggctctttggccatataggccaccaggtcctgcaggcgcgctcttcaggaggcgcgccaactgccctcttaattaacgaagaagatcggaccggggccgcggatctttgcaaagatccaaaaaaagcatgcgtacggattagaagccgccgagcgggtgacagccctccgaaggaagactctcctccgtgcgtcctcgtcttcaccggtcgcgttcctgaaacgcagatgtgcctcgcgccgcactgctccgaacaataaagattctacaatactagcttttatggttatgaagaggaaaattggcagtaacctggccccacaaacctcaaatgaacgaatcaaattaacaaccagatatctcgactgaaaaaaaaggtttaaaccagttccctgaaattattcccctacttgactaataagtatataaagacggtaggtattgattgtaattctgtaaatctatttcttaaacttcttgaattctacttttatagttagtcttttttttagttttaaaacaccaagaacttagtttcgaataaacacacataaataaaccatgaaatcttctcaccatcaccatcaccatcaccatcaccatggttcttctatgaaaatcgaagaaggtaaactggtaatctggattaacggcgataaaggctataacggtctcgctgaagtcggtaagaaattcgagaaagataccggaattaaagtcaccgttgagcatccggataaactggaagagaaattcccacaggttgcggcaactggcgatggccctgacattatcttctgggcacacgaccgctttggtggctacgctcaatctggcctgttggctgaaatcaccccggacaaagcgttccaggacaagctgtatccgtttacctgggatgccgtacgttacaacggcaagctgattgcttacccgatcgctgttgaagcgttatcgctgatttataacaaagatctgctgccgaacccgccaaaaacctgggaagagatcccggcgctggataaagaactgaaagcgaaaggtaagagcgcgctgatgttcaacctgcaagaaccgtacttcacctggccgctgattgctgctgacgggggttatgcgttcaagtatgaaaacggcaagtacgacattaaagacgtgggcgtggataacgctggcgcgaaagcgggtctgaccttcctggttgacctgattaaaaacaaacacatgaatgcagacaccgattactccatcgcagaagctgcctttaataaaggcgaaacagcgatgaccatcaacggcccgtgggcatggtccaacatcgacaccagcaaagtgaattatggtgtaacggtactgccgaccttcaagggtcaaccatccaaaccgttcgttggcgtgctgagcgcaggtattaacgccgccagtccgaacaaagagctggcaaaagagttcctcgaaaactatctgctgactgatgaaggtctggaagcggttaataaagacaaaccgctgggtgccgtagcgctgaagtcttacgaggaagagttggcgaaagatccacgtattgccgccactatggaaaacgcccagaaaggtgaaatcatgccgaacatcccgcagatgtccgctttctggtatgccgtgcgtactgcggtgatcaacgccgccagcggtcgtcagactgtcgatgaagccctgaaagacgcgcagactaattcgagctcgaacaacaacaacaataacaataacaacaacctcgggatcgaggaaaacctgtacttccaatccaatgcaaaacgcaaacgagaggatttaacactatgggatgctgcaaacgtccacaaacacaaaagtatgtggtattggtgggagtacattagaaggaaagatctaataaatcatgagaaaactgattgcgatgtgattcaattgttacagtctgctagtgtcaaaaagcaaaagacacagtccgataaatttctaacatcattctctgttggaattcgtcctactaaacatcaaaaacaagtcctcaacgaaatgcttcgcgtttcaaattatacgtacaattggtgcttgtggttagtaaacgaaaaaggattaaaaccacaccaattcgagctacagaaaatcgtttgcaaaacaaatgctagggatgtggatccgcagtacaggatggcaaacgatgattggttcttcaacaacaaaatgactagagtaaagggaacatcatgcaaaaatttttgtacatcttacaagtcggctaaggctcttaaatcaaaactaaaacgaccaatgcctatttcaaatatcattgaaggatcttttggggttccaaatctttacataagattgctttcatctaaagacgtttgcacacatgaaaccaacatgcaaaacagatacatctgtatgatgccggacaattttgaaaagcgttcaaatcctaaagaacgattcctaaaattggctaaacgaataacaaacattcctcctataaatcacgatgtaaaaattgtcaagcgtgctgatggcatgtttatcatgaatattccttgtgatcctaagtatacaagaagaaatgcatcaaacgatacgatagagaaacgtgtgtgtggtattgatcctggtggtagaacgtttgctacagtatatgaccctattgactgttgtgttttccaagttggtattaaagaagacaagcagtatgtgattagtaaactccacaataaaattgatcatgcgcatatgcatttgacaaaagcgcaaaacaaaaagcaacaacaagcagcacgtgaacgaattgtatcactgaagaaaacacatttgaaactaaaaacgtttgtagaagatattcaccttaagctttcttcacatcttgtcaaagagtatcattatgttgcactgggtaaaatcaacgtcgcgccaatggtaaagaaaaaacatttatcgaaacgagctaaaagggatttgctatattggcaacattacagatttcgccaaaggctaactcaccgaactacgaacaccgaatgtatatttgaggttcaaaatgaagcatacacttcgatgacctgtggagtgtgtggaaaactcaataaaaatcttgaaaagagtgaaacattttattgtgatagttgtaactataacacgcacagagacgttaatggtgctagaaatattttgctcaaatcattgaacatgtttccgtttgaaaagaaacaacaataactctgtaataattaggtcgatccatcctaagttcgaaagttgattgctgggcaattttctgccgaatgatatgggttatgacactacgttagtgattgtgtgccataggtgcaaaaactttttttcgatggtaaacttttgccgtagatgcgaggccctcagctgtgtgtcatgtacgcggatcgacgatcgctgcgaatggtgtggcgaaattcagggttacggccaaaacagaggagtgaggcttttgcatctgtgatcgagcggactatgtgggctgatctagtggactatgtaaactgttgtacgttgttgttgcgaaagattgaatgtttgaaatattgattgttgcagaataaaatcgtttgaaactacatatacatagttgtttgtatttgctttgattagagttggataatatagtttgagaaaacatacgacactgggttatatcaataactaacgcaatagcgaaatcaaacattcgtgcacacaatagtacttgtttttcaactctgcgtttggtagttgcacgaataagtatatgttactacaagaataagaacaaaacgaattgaacggttcatgatatttatttacaacacgatcatacaaaacctactcatgtgtctatcaatagtcttgttcctggacccaccattcgcaaaaactggcaattcggtgaatgtttatggtgttccaagaacgcatcgtctgtagatttccaatgatacaacacaatgccacaacgaaaacatttgcaacggtcgtgttgtcccaagtagtacaacccgcaagaagcaagctggtatttgtttggttgtatttggggagaccaatgctcaaacgttttcagtctgtcgatatagttgttcatgaacatacttgtttcattcgtgcaaaaagcgtcggtatcatccatgatatgatatgatattatattacacatgcaattggttatttcaacatctttatacattttttgtctcaaaaatactcttggtcaaacgttacgggttttgttctcttggcttttgagctcaacaaaatcccattaatggtttgaagtcgttttgtgggatcttggtgtgtccagcacaaatcatatttcggattgatcagaataacctcgatatcgacatagtacacaatttccgtatctgtcgctttccaacattgatctcgcgtcgaaaaggtaaacttcacatctggatagagatccatgatgtacatttcgacagcgcttaagtcgactttgttcccactgtacttttagctcgtacaaaatacaatatacttttcatttctccgtaaacaacatgttttcccatgtaatatccttttctatttttcgttccgttaccaactttacacatactttatatagctattcacttctatacactaaaaaactaagacaattttaattttgctgcctgccatatttcaatttgttataaattcctataatttatcctattagtagctaaaaaaagatgaatgtgaatcgaatcctaagagaattcccctcgaagatcgatctggcggcccggccggccgcggccgcactcgagatatctagacccagctttcttgtacaaagtggtgatagcttgtcgagaagtactcgagggggggcccggtacccaattcgccctatagtgagtcgtattacgcgcgctcactggccgtcgttttacaacgtcgtgactgggaaaaccctggcgttacccaacttaatcgccttgcagcacatccccctttcgccagctggcgtaatagcgaagaggcccgcaccgatcgcccttcccaacagttgcgcagcctgaatggcgaatggacgcgccctgtagcggcgcattaagcgcggcgggtgtggtggttacgcgcagcgtgaccgctacacttgccagcgccctagcgcccgctcctttcgctttcttcccttcctttctcgccacgttcgccggctttccccgtcaagctctaaatcgggggctccctttagggttccgatttagtgctttacggcacctcgaccccaaaaaacttgattagggtgatggttcacgtagtgggccatcgccctgatagacggtttttcgccctttgacgttggagtccacgttctttaatagtggactcttgttccaaactggaacaacactcaaccctatctcggtctattcttttgatttataagggattttgccgatttcggcctattggttaaaaaatgagctgatttaacaaaaatttaacgcgaattttaacaaaatattaacgcttacaatttcctgatgcggtattttctccttacgcatctgtgcggtatttcacaccgcatagggtaataactgatataattaaattgaagctctaatttgtgagtttagtatacatgcatttacttataatacagttttttagttttgctggccgcatcttctcaaatatgcttcccagcctgcttttctgtaacgttcaccctctaccttagcatcccttccctttgcaaatagtcctcttccaacaataataatgtcagatcctgtagagaccacatcatccacggttctatactgttgacccaatgcgtctcccttgtcatctaaacccacaccgggtgtcataatcaaccaatcgtaaccttcatctcttccacccatgtctctttgagcaataaagccgataacaaaatctttgtcgctcttcgcaatgtcaacagtacccttagtatattctccagtagatagggagcccttgcatgacaattctgctaacatcaaaaggcctctaggttcctttgttacttcttctgccgcctgcttcaaaccgctaacaatacctgggcccaccacaccgtgtgcattcgtaatgtctgcccattctgctattctgtatacacccgcagagtactgcaatttgactgtattaccaatgtcagcaaattttctgtcttcgaagagtaaaaaattgtacttggcggataatgcctttagcggcttaactgtgccctccatggaaaaatcagtcaagatatccacatgtgtttttagtaaacaaattttgggacctaatgcttcaactaactccagtaattccttggtggtacgaacatccaatgaagcacacaagtttgtttgcttttcgtgcatgatattaaatagcttggcagcaacaggactaggatgagtagcagcacgttccttatatgtagctttcgacatgatttatcttcgtttcctgcaggtttttgttctgtgcagttgggttaagaatactgggcaatttcatgtttcttcaacactacatatgcgtatatataccaatctaagtctgtgctccttccttcgttcttccttctgttcggagattaccgaatcaaaaaaatttcaaggaaaccgaaatcaaaaaaaagaataaaaaaaaaatgatgaattgaaaaggtggtatggtgcactctcagtacaatctgctctgatgccgcatagttaagccagccccgacacccgccaacacccgctgacgcgccctgacgggcttgtctgctcccggcatccgcttacagacaagctgtgaccgtctccgggagctgcatgtgtcagaggttttcaccgtcatcaccgaaacgcgcga

SEQ ID NO: 3926 - RNA, 10132 nt, Saccharomyces cerevisiae
  source 1..10132: mol_type = other RNA
gacgaaagggcctcgtgatacgcctatttttataggttaatgtcatgataataatggtttcttagtatgatccaatatcaaaggaaatgatagcattgaaggatgagactaatccaattgaggagtggcagcatatagaacagctaaagggtagtgctgaaggaagcatacgataccccgcatggaatgggataatatcacaggaggtactagactacctttcatcctacataaatagacgcatataagtacgcatttaagcataaacacgcactatgccgttcttctcatgtatatatatatacaggcaacacgcagatataggtgcgacgtgaacagtgagctgtatgtgcgcagctcgcgttgcattttcggaagcgctcgttttcggaaacgctttgaagttcctattccgaagttcctattctctagaaagtataggaacttcagagcgcttttgaaaaccaaaagcgctctgaagacgcactttcaaaaaaccaaaaacgcaccggactgtaacgagctactaaaatattgcgaataccgcttccacaaacattgctcaaaagtatctctttgctatatatctctgtgctatatccctatataacctacccatccacctttcgctccttgaacttgcatctaaactcgacctctacattttttatgtttatctctagtattactctttagacaaaaaaattgtagtaagaactattcatagagtgaatcgaaaacaatacgaaaatgtaaacatttcctatacgtagtatatagagacaaaatagaagaaaccgttcataattttctgaccaatgaagaatcatcaacgctatcactttctgttcacaaagtatgcgcaatccacatcggtatagaatataatcggggatgcctttatcttgaaaaaatgcacccgcagcttcgctagtaatcagtaaacgcgggaagtggagtcaggctttttttatggaagagaaaatagacaccaaagtagccttcttctaaccttaacggacctacagtgcaaaaagttatcaagagactgcattatagagcgcacaaaggagaaaaaaagtaatctaagatgctttgttagaaaaatagcgctctcgggatgcatttttgtagaacaaaaaagaagtatagattctttgttggtaaaatagcgctctcgcgttgcatttctgttctgtaaaaatgcagctcagattctttgtttgaaaaattagcgctctcgcgttgcatttttgttttacaaaaatgaagcacagattcttcgttggtaaaatagcgctttcgcgttgcatttctgttctgtaaaaatgcagctcagattctttgtttgaaaaattagcgctctcgcgttgcatttttgttctacaaaatgaagcacagatgcttcgttcaggtggcacttttcggggaaatgtgcgcggaacccctatttgtttatttttctaaatacattcaaatatgtatccgctcatgagacaataaccctgataaatgcttcaataatattgaaaaaggaagagtatgagtattcaacatttccgtgtcgcccttattcccttttttgcggcattttgccttcctgtttttgctcacccagaaacgctggtgaaagtaaaagatgctgaagatcagttgggtgcacgagtgggttacatcgaactggatctcaacagcggtaagatccttgagagttttcgccccgaagaacgttttccaatgatgagcacttttaaagttctgctatgtggcgcggtattatcccgtattgacgccgggcaagagcaactcggtcgccgcatacactattctcagaatgacttggttgagtactcaccagtcacagaaaagcatcttacggatggcatgacagtaagagaattatgcagtgctgccataaccatgagtgataacactgcggccaacttacttctgacaacgatcggaggaccgaaggagctaaccgcttttttgcacaacatgggggatcatgtaactcgccttgatcgttgggaaccggagctgaatgaagccataccaaacgacgagcgtgacaccacgatgcctgtagcaatggcaacaacgttgcgcaaactattaactggcgaactacttactctagcttcccggcaacaattaatagactggatggaggcggataaagttgcaggaccacttctgcgctcggcccttccggctggctggtttattgctgataaatctggagccggtgagcgtgggtctcgcggtatcattgcagcactggggccagatggtaagccctcccgtatcgtagttatctacacgacggggagtcaggcaactatggatgaacgaaatagacagatcgctgagataggtgcctcactgattaagcattggtaactgtcagaccaagtttactcatatatactttagattgatttaaaacttcatttttaatttaaaaggatctaggtgaagatcctttttgataatctcatgaccaaaatcccttaacgtgagttttcgttccactgagcgtcagaccccgtagaaaagatcaaaggatcttcttgagatcctttttttctgcgcgtaatctgctgcttgcaaacaaaaaaaccaccgctaccagcggtggtttgtttgccggatcaagagctaccaactctttttccgaaggtaactggcttcagcagagcgcagataccaaatactgttcttctagtgtagccgtagttaggccaccacttcaagaactctgtagcaccgcctacatacctcgctctgctaatcctgttaccagtggctgctgccagtggcgataagtcgtgtcttaccgggttggactcaagacgatagttaccggataaggcgcagcggtcgggctgaacggggggttcgtgcacacagcccagcttggagcgaacgacctacaccgaactgagatacctacagcgtgagctatgagaaagcgccacgcttcccgaagggagaaaggcggacaggtatccggtaagcggcagggtcggaacaggagagcgcacgagggagcttccagggggaaacgcctggtatctttatagtcctgtcgggtttcgccacctctgacttgagcgtcgatttttgtgatgctcgtcaggggggcggagcctatggaaaaacgccagcaacgcggcctttttacggttcctggccttttgctggccttttgctcacatgttctttcctgcgttatcccctgattctgtggataaccgtattaccgcctttgagtgagctgataccgctcgccgcagccgaacgaccgagcgcagcgagtcagtgagcgaggaagcggaagagcgcccaatacgcaaaccgcctctccccgcgcgttggccgattcattaatgcagctggcacgacaggtttcccgactggaaagcgggcagtgagcgcaacgcaattaatgtgagttagctcactcattaggcaccccaggctttacactttatgcttccggctcgtatgttgtgtggaattgtgagcggataacaatttcacacaggaaacagctatgaccatgattacgccaagcgcgcaattaaccctcactaaagggaacaaaagctggagctccaccgcggtggcggcccccgtcccaccatcgggcgcggatcatcacaagtttgtacaaaaaagcaggctctttggccatataggccaccaggtcctgcaggcgcgctcttcaggaggcgcgccaactgccctcttaattaacgaagaagatcggaccggggccgcggatctttgcaaagatccaaaaaaagcatgcgtacggattagaagccgccgagcgggtgacagccctccgaaggaagactctcctccgtgcgtcctcgtcttcaccggtcgcgttcctgaaacgcagatgtgcctcgcgccgcactgctccgaacaataaagattctacaatactagcttttatggttatgaagaggaaaattggcagtaacctggccccacaaacctcaaatgaacgaatcaaattaacaaccagatatctcgactgaaaaaaaaggtttaaaccagttccctgaaattattcccctacttgactaataagtatataaagacggtaggtattgattgtaattctgtaaatctatttcttaaacttcttgaattctacttttatagttagtcttttttttagttttaaaacaccaagaacttagtttcgaataaacacacataaataaaccatgaaatcttctcaccatcaccatcaccatcaccatcaccatggttcttctatgaaaatcgaagaaggtaaactggtaatctggattaacggcgataaaggctataacggtctcgctgaagtcggtaagaaattcgagaaagataccggaattaaagtcaccgttgagcatccggataaactggaagagaaattcccacaggttgcggcaactggcgatggccctgacattatcttctgggcacacgaccgctttggtggctacgctcaatctggcctgttggctgaaatcaccccggacaaagcgttccaggacaagctgtatccgtttacctgggatgccgtacgttacaacggcaagctgattgcttacccgatcgctgttgaagcgttatcgctgatttataacaaagatctgctgccgaacccgccaaaaacctgggaagagatcccggcgctggataaagaactgaaagcgaaaggtaagagcgcgctgatgttcaacctgcaagaaccgtacttcacctggccgctgattgctgctgacgggggttatgcgttcaagtatgaaaacggcaagtacgacattaaagacgtgggcgtggataacgctggcgcgaaagcgggtctgaccttcctggttgacctgattaaaaacaaacacatgaatgcagacaccgattactccatcgcagaagctgcctttaataaaggcgaaacagcgatgaccatcaacggcccgtgggcatggtccaacatcgacaccagcaaagtgaattatggtgtaacggtactgccgaccttcaagggtcaaccatccaaaccgttcgttggcgtgctgagcgcaggtattaacgccgccagtccgaacaaagagctggcaaaagagttcctcgaaaactatctgctgactgatgaaggtctggaagcggttaataaagacaaaccgctgggtgccgtagcgctgaagtcttacgaggaagagttggcgaaagatccacgtattgccgccactatggaaaacgcccagaaaggtgaaatcatgccgaacatcccgcagatgtccgctttctggtatgccgtgcgtactgcggtgatcaacgccgccagcggtcgtcagactgtcgatgaagccctgaaagacgcgcagactaattcgagctcgaacaacaacaacaataacaataacaacaacctcgggatcgaggaaaacctgtacttccaatccaatgcaccgccaaagaagaagcaaaagcttgaaaggctcaaaaaactcgacaaacccaccttacatacctgcaacaagacgtcctttgcaaaggctttcttgcctaatgagacctaccggcagcgtcttctagattacatcgccatcatccatcaactcgctgaccatgcttcccacgctctcaaattctacatcctctctacatccacatcgtctttcccggttgttcacgaagatacaatcgaagccattctctatcttctcaacaagggggaggcttggcatccaagaaaggaagcaaagaaggcatggcgggattgtttgttgccatatgttcaacggtactgccaaatcgtcggcttcattcatccaaatctacgaggcgagcagcagtcaattaattacctgacagtgagtatgatgacgaacctgaaagtcaacgttcaagagcatttcatgcagatgctgctccggtacattaatctgcggttcgacgtgaagggacagaagcagcgactgccaccgaaaagcgatgcgcgaaaggctttctttactcggctacgctacttgaagtcggttttcctttttgatgtggtgcccgagttggagttcctggatgacttgacaccattggagagcgaggttcttgaagagatttggtcattggatctcccattccttcctaacgatccccttgcctacgccattgttgctgatccgatgtcattttttcccgcgtactgcaaactctctgggctgtatgaacaatatggcttccaacggttcagtgcgatacctctgcgccgctcgctcattcaaagtcacgtgcgaatcgacaccatcatcctgtaccagcatatcctttgcatcacgcggcgagacgcagaaactgtcgaaaaggatgatctgtggatgcgcgtctgcaatctatgtaccaaggcttttcggtctcgctgtggtatgcattttgaaggctcaatcaccacggatggagcctcggtgtctgtatacctaaagcacccagaagcagacaagtatggaaagcgcggagcgagaaagtcagcaaacacggtggctgcagaggttaaagcgctttatgtggagaacaacttacctgcttgtcgagcagcagagaatgtcgtcgttatcgacccaaacaagcgcgacattctctactgccaagacagcaatggtacgacatttcgctacaccgccaaccagcgagccgtggagactggaagccggcggtttgcaaagagacgagaagcaatgaaggaagaagctggagttgatctcatagaatcacgaataccatcccacaaaacaatgaacctcatggacttcactcgctaccttctcgttcgccgcgctgattgggatcgtcgcaaggaattctattcgcatcctgctcatactcgatggaaatggcactccttcataaaccgtcagaagagcgaatcagacctcataagtaacatgcgcaacaagtacggtgaaaactttactgttgtgatgggtgattggagcgacgctggtcgaactgcgagatttcagacctcatcaaagacaaaaggctggcgcaccctctttaagcgcaaccgcattgattgtttccttctcgacgagtacaagacctcatctgtttgccctcgctgttcctcatctgagtttgtggagaaaaaattcaaaacacgacctcattcaagaccttggcgccgtcgtgaaggcaagattgaaaaagtccacggactgctgggttgtaccaaccctaactgtttgcagcaagcctggacatcgggaatgcgctactggaatcgagatatgctgtcaacctgcaacatgctattgattgtgagatcaatgttggatggacacggtagaccagaagtgttcagcaggagtgttccagccgtagcgtagaacgtagattggttagattaggttttccgagccggttgtcgcgcggttcaatccctggtgcgggtgctagtgccaatacccaccggctccgcactagagaagtcatttaataaggccactgttaaaaatacatcaatgagacgagtgccctggtgcaagatctaccatctgcactactcttctcaataatcttgccattaattatcttagcagaccaactattccgtttgccttctttgggccacaaccgcggttgcctgaggcatcatatcgggaaaccatttcggccatacatatccatacatgacaacccaaaaagccaagcctgcaattgttcctgcgcttaagtcgactttgttcccactgtacttttagctcgtacaaaatacaatatacttttcatttctccgtaaacaacatgttttcccatgtaatatccttttctatttttcgttccgttaccaactttacacatactttatatagctattcacttctatacactaaaaaactaagacaattttaattttgctgcctgccatatttcaatttgttataaattcctataatttatcctattagtagctaaaaaaagatgaatgtgaatcgaatcctaagagaattcccctcgaagatcgatctggcggcccggccggccgcggccgcactcgagatatctagacccagctttcttgtacaaagtggtgatagcttgtcgagaagtactcgagggggggcccggtacccaattcgccctatagtgagtcgtattacgcgcgctcactggccgtcgttttacaacgtcgtgactgggaaaaccctggcgttacccaacttaatcgccttgcagcacatccccctttcgccagctggcgtaatagcgaagaggcccgcaccgatcgcccttcccaacagttgcgcagcctgaatggcgaatggacgcgccctgtagcggcgcattaagcgcggcgggtgtggtggttacgcgcagcgtgaccgctacacttgccagcgccctagcgcccgctcctttcgctttcttcccttcctttctcgccacgttcgccggctttccccgtcaagctctaaatcgggggctccctttagggttccgatttagtgctttacggcacctcgaccccaaaaaacttgattagggtgatggttcacgtagtgggccatcgccctgatagacggtttttcgccctttgacgttggagtccacgttctttaatagtggactcttgttccaaactggaacaacactcaaccctatctcggtctattcttttgatttataagggattttgccgatttcggcctattggttaaaaaatgagctgatttaacaaaaatttaacgcgaattttaacaaaatattaacgcttacaatttcctgatgcggtattttctccttacgcatctgtgcggtatttcacaccgcatagggtaataactgatataattaaattgaagctctaatttgtgagtttagtatacatgcatttacttataatacagttttttagttttgctggccgcatcttctcaaatatgcttcccagcctgcttttctgtaacgttcaccctctaccttagcatcccttccctttgcaaatagtcctcttccaacaataataatgtcagatcctgtagagaccacatcatccacggttctatactgttgacccaatgcgtctcccttgtcatctaaacccacaccgggtgtcataatcaaccaatcgtaaccttcatctcttccacccatgtctctttgagcaataaagccgataacaaaatctttgtcgctcttcgcaatgtcaacagtacccttagtatattctccagtagatagggagcccttgcatgacaattctgctaacatcaaaaggcctctaggttcctttgttacttcttctgccgcctgcttcaaaccgctaacaatacctgggcccaccacaccgtgtgcattcgtaatgtctgcccattctgctattctgtatacacccgcagagtactgcaatttgactgtattaccaatgtcagcaaattttctgtcttcgaagagtaaaaaattgtacttggcggataatgcctttagcggcttaactgtgccctccatggaaaaatcagtcaagatatccacatgtgtttttagtaaacaaattttgggacctaatgcttcaactaactccagtaattccttggtggtacgaacatccaatgaagcacacaagtttgtttgcttttcgtgcatgatattaaatagcttggcagcaacaggactaggatgagtagcagcacgttccttatatgtagctttcgacatgatttatcttcgtttcctgcaggtttttgttctgtgcagttgggttaagaatactgggcaatttcatgtttcttcaacactacatatgcgtatatataccaatctaagtctgtgctccttccttcgttcttccttctgttcggagattaccgaatcaaaaaaatttcaaggaaaccgaaatcaaaaaaaagaataaaaaaaaaatgatgaattgaaaaggtggtatggtgcactctcagtacaatctgctctgatgccgcatagttaagccagccccgacacccgccaacacccgctgacgcgccctgacgggcttgtctgctcccggcatccgcttacagacaagctgtgaccgtctccgggagctgcatgtgtcagaggttttcaccgtcatcaccgaaacgcgcga

SEQ ID NO: 3927 - RNA, 9848 nt, Saccharomyces cerevisiae
  source 1..9848: mol_type = other RNA
gacgaaagggcctcgtgatacgcctatttttataggttaatgtcatgataataatggtttcttagtatgatccaatatcaaaggaaatgatagcattgaaggatgagactaatccaattgaggagtggcagcatatagaacagctaaagggtagtgctgaaggaagcatacgataccccgcatggaatgggataatatcacaggaggtactagactacctttcatcctacataaatagacgcatataagtacgcatttaagcataaacacgcactatgccgttcttctcatgtatatatatatacaggcaacacgcagatataggtgcgacgtgaacagtgagctgtatgtgcgcagctcgcgttgcattttcggaagcgctcgttttcggaaacgctttgaagttcctattccgaagttcctattctctagaaagtataggaacttcagagcgcttttgaaaaccaaaagcgctctgaagacgcactttcaaaaaaccaaaaacgcaccggactgtaacgagctactaaaatattgcgaataccgcttccacaaacattgctcaaaagtatctctttgctatatatctctgtgctatatccctatataacctacccatccacctttcgctccttgaacttgcatctaaactcgacctctacattttttatgtttatctctagtattactctttagacaaaaaaattgtagtaagaactattcatagagtgaatcgaaaacaatacgaaaatgtaaacatttcctatacgtagtatatagagacaaaatagaagaaaccgttcataattttctgaccaatgaagaatcatcaacgctatcactttctgttcacaaagtatgcgcaatccacatcggtatagaatataatcggggatgcctttatcttgaaaaaatgcacccgcagcttcgctagtaatcagtaaacgcgggaagtggagtcaggctttttttatggaagagaaaatagacaccaaagtagccttcttctaaccttaacggacctacagtgcaaaaagttatcaagagactgcattatagagcgcacaaaggagaaaaaaagtaatctaagatgctttgttagaaaaatagcgctctcgggatgcatttttgtagaacaaaaaagaagtatagattctttgttggtaaaatagcgctctcgcgttgcatttctgttctgtaaaaatgcagctcagattctttgtttgaaaaattagcgctctcgcgttgcatttttgttttacaaaaatgaagcacagattcttcgttggtaaaatagcgctttcgcgttgcatttctgttctgtaaaaatgcagctcagattctttgtttgaaaaattagcgctctcgcgttgcatttttgttctacaaaatgaagcacagatgcttcgttcaggtggcacttttcggggaaatgtgcgcggaacccctatttgtttatttttctaaatacattcaaatatgtatccgctcatgagacaataaccctgataaatgcttcaataatattgaaaaaggaagagtatgagtattcaacatttccgtgtcgcccttattcccttttttgcggcattttgccttcctgtttttgctcacccagaaacgctggtgaaagtaaaagatgctgaagatcagttgggtgcacgagtgggttacatcgaactggatctcaacagcggtaagatccttgagagttttcgccccgaagaacgttttccaatgatgagcacttttaaagttctgctatgtggcgcggtattatcccgtattgacgccgggcaagagcaactcggtcgccgcatacactattctcagaatgacttggttgagtactcaccagtcacagaaaagcatcttacggatggcatgacagtaagagaattatgcagtgctgccataaccatgagtgataacactgcggccaacttacttctgacaacgatcggaggaccgaaggagctaaccgcttttttgcacaacatgggggatcatgtaactcgccttgatcgttgggaaccggagctgaatgaagccataccaaacgacgagcgtgacaccacgatgcctgtagcaatggcaacaacgttgcgcaaactattaactggcgaactacttactctagcttcccggcaacaattaatagactggatggaggcggataaagttgcaggaccacttctgcgctcggcccttccggctggctggtttattgctgataaatctggagccggtgagcgtgggtctcgcggtatcattgcagcactggggccagatggtaagccctcccgtatcgtagttatctacacgacggggagtcaggcaactatggatgaacgaaatagacagatcgctgagataggtgcctcactgattaagcattggtaactgtcagaccaagtttactcatatatactttagattgatttaaaacttcatttttaatttaaaaggatctaggtgaagatcctttttgataatctcatgaccaaaatcccttaacgtgagttttcgttccactgagcgtcagaccccgtagaaaagatcaaaggatcttcttgagatcctttttttctgcgcgtaatctgctgcttgcaaacaaaaaaaccaccgctaccagcggtggtttgtttgccggatcaagagctaccaactctttttccgaaggtaactggcttcagcagagcgcagataccaaatactgttcttctagtgtagccgtagttaggccaccacttcaagaactctgtagcaccgcctacatacctcgctctgctaatcctgttaccagtggctgctgccagtggcgataagtcgtgtcttaccgggttggactcaagacgatagttaccggataaggcgcagcggtcgggctgaacggggggttcgtgcacacagcccagcttggagcgaacgacctacaccgaactgagatacctacagcgtgagctatgagaaagcgccacgcttcccgaagggagaaaggcggacaggtatccggtaagcggcagggtcggaacaggagagcgcacgagggagcttccagggggaaacgcctggtatctttatagtcctgtcgggtttcgccacctctgacttgagcgtcgatttttgtgatgctcgtcaggggggcggagcctatggaaaaacgccagcaacgcggcctttttacggttcctggccttttgctggccttttgctcacatgttctttcctgcgttatcccctgattctgtggataaccgtattaccgcctttgagtgagctgataccgctcgccgcagccgaacgaccgagcgcagcgagtcagtgagcgaggaagcggaagagcgcccaatacgcaaaccgcctctccccgcgcgttggccgattcattaatgcagctggcacgacaggtttcccgactggaaagcgggcagtgagcgcaacgcaattaatgtgagttagctcactcattaggcaccccaggctttacactttatgcttccggctcgtatgttgtgtggaattgtgagcggataacaatttcacacaggaaacagctatgaccatgattacgccaagcgcgcaattaaccctcactaaagggaacaaaagctggagctccaccgcggtggcggcccccgtcccaccatcgggcgcggatcatcacaagtttgtacaaaaaagcaggctctttggccatataggccaccaggtcctgcaggcgcgctcttcaggaggcgcgccaactgccctcttaattaacgaagaagatcggaccggggccgcggatctttgcaaagatccaaaaaaagcatgcgtacggattagaagccgccgagcgggtgacagccctccgaaggaagactctcctccgtgcgtcctcgtcttcaccggtcgcgttcctgaaacgcagatgtgcctcgcgccgcactgctccgaacaataaagattctacaatactagcttttatggttatgaagaggaaaattggcagtaacctggccccacaaacctcaaatgaacgaatcaaattaacaaccagatatctcgactgaaaaaaaaggtttaaaccagttccctgaaattattcccctacttgactaataagtatataaagacggtaggtattgattgtaattctgtaaatctatttcttaaacttcttgaattctacttttatagttagtcttttttttagttttaaaacaccaagaacttagtttcgaataaacacacataaataaaccatgaaatcttctcaccatcaccatcaccatcaccatcaccatggttcttctatgaaaatcgaagaaggtaaactggtaatctggattaacggcgataaaggctataacggtctcgctgaagtcggtaagaaattcgagaaagataccggaattaaagtcaccgttgagcatccggataaactggaagagaaattcccacaggttgcggcaactggcgatggccctgacattatcttctgggcacacgaccgctttggtggctacgctcaatctggcctgttggctgaaatcaccccggacaaagcgttccaggacaagctgtatccgtttacctgggatgccgtacgttacaacggcaagctgattgcttacccgatcgctgttgaagcgttatcgctgatttataacaaagatctgctgccgaacccgccaaaaacctgggaagagatcccggcgctggataaagaactgaaagcgaaaggtaagagcgcgctgatgttcaacctgcaagaaccgtacttcacctggccgctgattgctgctgacgggggttatgcgttcaagtatgaaaacggcaagtacgacattaaagacgtgggcgtggataacgctggcgcgaaagcgggtctgaccttcctggttgacctgattaaaaacaaacacatgaatgcagacaccgattactccatcgcagaagctgcctttaataaaggcgaaacagcgatgaccatcaacggcccgtgggcatggtccaacatcgacaccagcaaagtgaattatggtgtaacggtactgccgaccttcaagggtcaaccatccaaaccgttcgttggcgtgctgagcgcaggtattaacgccgccagtccgaacaaagagctggcaaaagagttcctcgaaaactatctgctgactgatgaaggtctggaagcggttaataaagacaaaccgctgggtgccgtagcgctgaagtcttacgaggaagagttggcgaaagatccacgtattgccgccactatggaaaacgcccagaaaggtgaaatcatgccgaacatcccgcagatgtccgctttctggtatgccgtgcgtactgcggtgatcaacgccgccagcggtcgtcagactgtcgatgaagccctgaaagacgcgcagactaattcgagctcgaacaacaacaacaataacaataacaacaacctcgggatcgaggaaaacctgtacttccaatccaatgcaaacctactcatcctcctactaatccatctcttgcacacggcatcattccattctgggatgagtactcacaacaagtatcggataaactttgggcatgttcaagagattcctttcatgagtttaatcagtacaacaacaagggatgcactgacggatggttcaacttttctcaattcactgtgattgaatcccagccagtatttgatgttccactcaatgttcatcactctataacagagaatgtggcttttgataactctaaaaagccacctcagctcaagaaggcaaagaagggtcagaagactccccaaaaatttcaagcggacaaatcaatgaaaattcgtctctaccccaatgaacaagaaaggacaacattgaatcagtggatgggaactgctcgttggatctacaacaagtgtttagaattcaccaacaaatccaaaggtgtcaagaaaaataagaagaatttcagaacgtttgtggtgaacaacgataattatcagacagaaaatcagtgggttgtaaatactccttatgacgtaagagatgctgccgctattgaattgttaactgcgttcaacactaattttgaaaagaagaaggctggaacgattgacaagttcatgatccgtttcaggcgaaagaaagacagaaaagatcatttcgttctgcgttgcaagcactggaagaaaaagagtggaatgtattcttttataaggaacatcaagagcgccgaacctttgcctgaggagcttcagtatgattccatcattattaagaacaagttgaaccattattatttatgtattccacaagtactggatattaggggtgagaaccaagcccctcaacattcaggacaagttgtagcattggatccaggagtaagaacatttcagaccacctttgatttgaatggttattcaaccaaatggggctcaggaggtgccgaaagaattggtagattgtgttgcgcgtatgacaagttacaatcgaagtggtctcaaccagaagtcagacattgcaaaagatacaagtacaagagagcaggaagaagaattcaacaaaagattagaaatattgtggatgatttacacaagaaactgtgtttgtggctgtgtcgaaactaccaagtgatcttacttccttcgtttgagactcagaaaatggtaaagaaactccacaggagaattaatagcaagacagcaagaaaaatgttgacttggtcacattacagattcaagcaaagattgcttcacaaagctagagagcatccgtggacacacatttatattgtcaacgaagcgtatacatccaaaacttgctcatgttgtggacatgtttatacggttggatcatcggaagtgtttcgttgtccatcatgtggctcaatttttgacagagatatcaatggagccagaaatattcttcttcgattccttactactcatagaattagtttttgagcaccttgtgtgttgggtcttccccaccttgtgtgcgttgggtcctttcccctggctttcactctttgagtgtttgcttgcaagatcagcactttgttcgatttgtttgttttgttcaaattgttgatttaaataaaggcggagaagtcatttaataaggccactgttaaaaattgatgcatgaacccaaagacaataaatttggcaataaaaaaaaattctgaaggcggttgcccgtgttgagtgtgccacatagaaaacacccgagcctcattctcatcatccgagagccaaattcctttttgaatttgaatcatcattgttgaatttttatacaagagtttcatctcaaaaacattgctgtccccgagattttaaaaagatcatcatcatcagaaaattcatatgggaggaatttgctcaaccatgtccaccagtacaacattaccagtccagaaatttagacctattgtcatttgtggtcctagcggagttggaaaaggaagcttaagtcgactttgttcccactgtacttttagctcgtacaaaatacaatatacttttcatttctccgtaaacaacatgttttcccatgtaatatccttttctatttttcgttccgttaccaactttacacatactttatatagctattcacttctatacactaaaaaactaagacaattttaattttgctgcctgccatatttcaatttgttataaattcctataatttatcctattagtagctaaaaaaagatgaatgtgaatcgaatcctaagagaattcccctcgaagatcgatctggcggcccggccggccgcggccgcactcgagatatctagacccagctttcttgtacaaagtggtgatagcttgtcgagaagtactcgagggggggcccggtacccaattcgccctatagtgagtcgtattacgcgcgctcactggccgtcgttttacaacgtcgtgactgggaaaaccctggcgttacccaacttaatcgccttgcagcacatccccctttcgccagctggcgtaatagcgaagaggcccgcaccgatcgcccttcccaacagttgcgcagcctgaatggcgaatggacgcgccctgtagcggcgcattaagcgcggcgggtgtggtggttacgcgcagcgtgaccgctacacttgccagcgccctagcgcccgctcctttcgctttcttcccttcctttctcgccacgttcgccggctttccccgtcaagctctaaatcgggggctccctttagggttccgatttagtgctttacggcacctcgaccccaaaaaacttgattagggtgatggttcacgtagtgggccatcgccctgatagacggtttttcgccctttgacgttggagtccacgttctttaatagtggactcttgttccaaactggaacaacactcaaccctatctcggtctattcttttgatttataagggattttgccgatttcggcctattggttaaaaaatgagctgatttaacaaaaatttaacgcgaattttaacaaaatattaacgcttacaatttcctgatgcggtattttctccttacgcatctgtgcggtatttcacaccgcatagggtaataactgatataattaaattgaagctctaatttgtgagtttagtatacatgcatttacttataatacagttttttagttttgctggccgcatcttctcaaatatgcttcccagcctgcttttctgtaacgttcaccctctaccttagcatcccttccctttgcaaatagtcctcttccaacaataataatgtcagatcctgtagagaccacatcatccacggttctatactgttgacccaatgcgtctcccttgtcatctaaacccacaccgggtgtcataatcaaccaatcgtaaccttcatctcttccacccatgtctctttgagcaataaagccgataacaaaatctttgtcgctcttcgcaatgtcaacagtacccttagtatattctccagtagatagggagcccttgcatgacaattctgctaacatcaaaaggcctctaggttcctttgttacttcttctgccgcctgcttcaaaccgctaacaatacctgggcccaccacaccgtgtgcattcgtaatgtctgcccattctgctattctgtatacacccgcagagtactgcaatttgactgtattaccaatgtcagcaaattttctgtcttcgaagagtaaaaaattgtacttggcggataatgcctttagcggcttaactgtgccctccatggaaaaatcagtcaagatatccacatgtgtttttagtaaacaaattttgggacctaatgcttcaactaactccagtaattccttggtggtacgaacatccaatgaagcacacaagtttgtttgcttttcgtgcatgatattaaatagcttggcagcaacaggactaggatgagtagcagcacgttccttatatgtagctttcgacatgatttatcttcgtttcctgcaggtttttgttctgtgcagttgggttaagaatactgggcaatttcatgtttcttcaacactacatatgcgtatatataccaatctaagtctgtgctccttccttcgttcttccttctgttcggagattaccgaatcaaaaaaatttcaaggaaaccgaaatcaaaaaaaagaataaaaaaaaaatgatgaattgaaaaggtggtatggtgcactctcagtacaatctgctctgatgccgcatagttaagccagccccgacacccgccaacacccgctgacgcgccctgacgggcttgtctgctcccggcatccgcttacagacaagctgtgaccgtctccgggagctgcatgtgtcagaggttttcaccgtcatcaccgaaacgcgcga

SEQ ID NO: 3928 - RNA, 10264 nt, Saccharomyces cerevisiae
  source 1..10264: mol_type = other RNA
gacgaaagggcctcgtgatacgcctatttttataggttaatgtcatgataataatggtttcttagtatgatccaatatcaaaggaaatgatagcattgaaggatgagactaatccaattgaggagtggcagcatatagaacagctaaagggtagtgctgaaggaagcatacgataccccgcatggaatgggataatatcacaggaggtactagactacctttcatcctacataaatagacgcatataagtacgcatttaagcataaacacgcactatgccgttcttctcatgtatatatatatacaggcaacacgcagatataggtgcgacgtgaacagtgagctgtatgtgcgcagctcgcgttgcattttcggaagcgctcgttttcggaaacgctttgaagttcctattccgaagttcctattctctagaaagtataggaacttcagagcgcttttgaaaaccaaaagcgctctgaagacgcactttcaaaaaaccaaaaacgcaccggactgtaacgagctactaaaatattgcgaataccgcttccacaaacattgctcaaaagtatctctttgctatatatctctgtgctatatccctatataacctacccatccacctttcgctccttgaacttgcatctaaactcgacctctacattttttatgtttatctctagtattactctttagacaaaaaaattgtagtaagaactattcatagagtgaatcgaaaacaatacgaaaatgtaaacatttcctatacgtagtatatagagacaaaatagaagaaaccgttcataattttctgaccaatgaagaatcatcaacgctatcactttctgttcacaaagtatgcgcaatccacatcggtatagaatataatcggggatgcctttatcttgaaaaaatgcacccgcagcttcgctagtaatcagtaaacgcgggaagtggagtcaggctttttttatggaagagaaaatagacaccaaagtagccttcttctaaccttaacggacctacagtgcaaaaagttatcaagagactgcattatagagcgcacaaaggagaaaaaaagtaatctaagatgctttgttagaaaaatagcgctctcgggatgcatttttgtagaacaaaaaagaagtatagattctttgttggtaaaatagcgctctcgcgttgcatttctgttctgtaaaaatgcagctcagattctttgtttgaaaaattagcgctctcgcgttgcatttttgttttacaaaaatgaagcacagattcttcgttggtaaaatagcgctttcgcgttgcatttctgttctgtaaaaatgcagctcagattctttgtttgaaaaattagcgctctcgcgttgcatttttgttctacaaaatgaagcacagatgcttcgttcaggtggcacttttcggggaaatgtgcgcggaacccctatttgtttatttttctaaatacattcaaatatgtatccgctcatgagacaataaccctgataaatgcttcaataatattgaaaaaggaagagtatgagtattcaacatttccgtgtcgcccttattcccttttttgcggcattttgccttcctgtttttgctcacccagaaacgctggtgaaagtaaaagatgctgaagatcagttgggtgcacgagtgggttacatcgaactggatctcaacagcggtaagatccttgagagttttcgccccgaagaacgttttccaatgatgagcacttttaaagttctgctatgtggcgcggtattatcccgtattgacgccgggcaagagcaactcggtcgccgcatacactattctcagaatgacttggttgagtactcaccagtcacagaaaagcatcttacggatggcatgacagtaagagaattatgcagtgctgccataaccatgagtgataacactgcggccaacttacttctgacaacgatcggaggaccgaaggagctaaccgcttttttgcacaacatgggggatcatgtaactcgccttgatcgttgggaaccggagctgaatgaagccataccaaacgacgagcgtgacaccacgatgcctgtagcaatggcaacaacgttgcgcaaactattaactggcgaactacttactctagcttcccggcaacaattaatagactggatggaggcggataaagttgcaggaccacttctgcgctcggcccttccggctggctggtttattgctgataaatctggagccggtgagcgtgggtctcgcggtatcattgcagcactggggccagatggtaagccctcccgtatcgtagttatctacacgacggggagtcaggcaactatggatgaacgaaatagacagatcgctgagataggtgcctcactgattaagcattggtaactgtcagaccaagtttactcatatatactttagattgatttaaaacttcatttttaatttaaaaggatctaggtgaagatcctttttgataatctcatgaccaaaatcccttaacgtgagttttcgttccactgagcgtcagaccccgtagaaaagatcaaaggatcttcttgagatcctttttttctgcgcgtaatctgctgcttgcaaacaaaaaaaccaccgctaccagcggtggtttgtttgccggatcaagagctaccaactctttttccgaaggtaactggcttcagcagagcgcagataccaaatactgttcttctagtgtagccgtagttaggccaccacttcaagaactctgtagcaccgcctacatacctcgctctgctaatcctgttaccagtggctgctgccagtggcgataagtcgtgtcttaccgggttggactcaagacgatagttaccggataaggcgcagcggtcgggctgaacggggggttcgtgcacacagcccagcttggagcgaacgacctacaccgaactgagatacctacagcgtgagctatgagaaagcgccacgcttcccgaagggagaaaggcggacaggtatccggtaagcggcagggtcggaacaggagagcgcacgagggagcttccagggggaaacgcctggtatctttatagtcctgtcgggtttcgccacctctgacttgagcgtcgatttttgtgatgctcgtcaggggggcggagcctatggaaaaacgccagcaacgcggcctttttacggttcctggccttttgctggccttttgctcacatgttctttcctgcgttatcccctgattctgtggataaccgtattaccgcctttgagtgagctgataccgctcgccgcagccgaacgaccgagcgcagcgagtcagtgagcgaggaagcggaagagcgcccaatacgcaaaccgcctctccccgcgcgttggccgattcattaatgcagctggcacgacaggtttcccgactggaaagcgggcagtgagcgcaacgcaattaatgtgagttagctcactcattaggcaccccaggctttacactttatgcttccggctcgtatgttgtgtggaattgtgagcggataacaatttcacacaggaaacagctatgaccatgattacgccaagcgcgcaattaaccctcactaaagggaacaaaagctggagctccaccgcggtggcggcccccgtcccaccatcgggcgcggatcatcacaagtttgtacaaaaaagcaggctctttggccatataggccaccaggtcctgcaggcgcgctcttcaggaggcgcgccaactgccctcttaattaacgaagaagatcggaccggggccgcggatctttgcaaagatccaaaaaaagcatgcgtacggattagaagccgccgagcgggtgacagccctccgaaggaagactctcctccgtgcgtcctcgtcttcaccggtcgcgttcctgaaacgcagatgtgcctcgcgccgcactgctccgaacaataaagattctacaatactagcttttatggttatgaagaggaaaattggcagtaacctggccccacaaacctcaaatgaacgaatcaaattaacaaccagatatctcgactgaaaaaaaaggtttaaaccagttccctgaaattattcccctacttgactaataagtatataaagacggtaggtattgattgtaattctgtaaatctatttcttaaacttcttgaattctacttttatagttagtcttttttttagttttaaaacaccaagaacttagtttcgaataaacacacataaataaaccatgaaatcttctcaccatcaccatcaccatcaccatcaccatggttcttctatgaaaatcgaagaaggtaaactggtaatctggattaacggcgataaaggctataacggtctcgctgaagtcggtaagaaattcgagaaagataccggaattaaagtcaccgttgagcatccggataaactggaagagaaattcccacaggttgcggcaactggcgatggccctgacattatcttctgggcacacgaccgctttggtggctacgctcaatctggcctgttggctgaaatcaccccggacaaagcgttccaggacaagctgtatccgtttacctgggatgccgtacgttacaacggcaagctgattgcttacccgatcgctgttgaagcgttatcgctgatttataacaaagatctgctgccgaacccgccaaaaacctgggaagagatcccggcgctggataaagaactgaaagcgaaaggtaagagcgcgctgatgttcaacctgcaagaaccgtacttcacctggccgctgattgctgctgacgggggttatgcgttcaagtatgaaaacggcaagtacgacattaaagacgtgggcgtggataacgctggcgcgaaagcgggtctgaccttcctggttgacctgattaaaaacaaacacatgaatgcagacaccgattactccatcgcagaagctgcctttaataaaggcgaaacagcgatgaccatcaacggcccgtgggcatggtccaacatcgacaccagcaaagtgaattatggtgtaacggtactgccgaccttcaagggtcaaccatccaaaccgttcgttggcgtgctgagcgcaggtattaacgccgccagtccgaacaaagagctggcaaaagagttcctcgaaaactatctgctgactgatgaaggtctggaagcggttaataaagacaaaccgctgggtgccgtagcgctgaagtcttacgaggaagagttggcgaaagatccacgtattgccgccactatggaaaacgcccagaaaggtgaaatcatgccgaacatcccgcagatgtccgctttctggtatgccgtgcgtactgcggtgatcaacgccgccagcggtcgtcagactgtcgatgaagccctgaaagacgcgcagactaattcgagctcgaacaacaacaacaataacaataacaacaacctcgggatcgaggaaaacctgtacttccaatccaatgcatcaaacattaggattgtaaaacgaaaggcgaagggcttcttcaagtgtgaggacctagtcacaatcaaggatgctgtcaaggcagctcataggatcatgtcagatgcgtccatactcgtccggtcatattatctgcgatggttccagagctcatatccccttgattcagatgacaaggaacttgagcttgagcacttccatatatccatggcctgcagcatagtccagggtataacaaggcctccagtccgtggtgttggtcctgaacaatctgtcaagatagacgtcttcaatgacatgttagatgagtataagaggctgtacgagcgtgctccaaatgataaagagaacgaaacggacctctctctatcgcatgtcttagcatattccatcgacaaccttcttaccgcgtataaaaacaacatcgaagcccatttctcaaaatatgtcaaacgcttcatccgatgtgatatgttggctaagggcttcaataagtctgaggcaaacagagtggcggcaatatataccaatgcctatatttatgactcatccctcgacctggaaccagactttatggaaagattaggccttgaggcaacaagttattcatctctattcccctctaagataaataagggcggttttccaagggtctatgacctgaaggccaacccttgggtctatcttccaaagatggtcatgataaatcaggccttagagacagacttctcttctgtagagcataaggagaggaggctgctcaatccactgcccttctattcatcgtttgttccgatgcacatacggattgatacatccggcttatcgcagctgctgatgactaaggataggcttgatgatttcaagagatcttatcttgctgagtttggagtaagtctaaatataaagaacaagggtgatatgctagcaagttttgagaagatctttggccggaaggcaacatccaatagagaggccggattgtatgcaacagagatgtggagcttcttgacaaacctgaagacatgccgtcaatggaaggagcttgatggggttgttcgtaagaacgatcccaagggaacacaatggatgtttgacaatgctgttgtaacggacggtgtttcaatctcattccaggtgatcgataacagcatgtttggacggaaggccttctctggcaggaagaagagggtagcatgtcaggaggccaatgatgaagaagatagcaagcaggtaacaagagaagagctaaagacatcgaagctcttgggatgtgaccctgggaagagagacatcctagcaataacagatggcataaagactatctgttacaccaaggggcagagagacatggacacgcataagacaataaggttgagaaccagtctgaagaggcgccgaggctgcggcctagaggagtatgagacacaggtgatgaaccggttccagaaacggtcatgccatcctgagatgtttcgacgctatgcctgttccaggaagaggatggaacacatgctgcttgaatgttattctcatccagtctttagagagttcaaattcttggtttacaacaagactaagagctccgaacataggttcatgcatagggtgttggaaacattcaaacggccgcaaacaaacctgagcaaggcgaggtgtgcgtcaggagttatgcgtatgaatgccttgaaggaggtccaaaggcatggagatatcattatagggtggggcaactggggaaagaatccaaacgcgctacgatgctcggcaggaccaaccccaggcattggaataaggagaaggtttgaatcgctgttcaaaacaacaacagtgccagaacactacacctcccaagaatgtccgagttgtaagggacgatgcctaagaaaggcaactggcaacccgatcatgagacaccatctgcttcgttgtacaaacgatagttgctgtagcaggtggtggaatcggaatgtagccggggcgttcaacatcctaacaaggctgttggatggacaaacactatccggtaacgaaactaccggagacgggttaggaggtgacgacctctaaaacctagaacttagagtgcaaaaacgccattacgattgtgatgcctattcaagggtgtcccaagtgtaaaaagaaagcactctaaggagaagtcatttaataaggccactgttaaaaataaggatgtctgaagcgttctcattgcatgatagattgttccaagccttgtcggtcatctcatcgatttttatatttatgattttcatagcagtcggattattattcaaacaaagaccttctatgtcaagtttgctctcatcaacccatggtaatagtctataagacatatcttatcctccttaagtatttcctgttgtgcttaagtcgactttgttcccactgtacttttagctcgtacaaaatacaatatacttttcatttctccgtaaacaacatgttttcccatgtaatatccttttctatttttcgttccgttaccaactttacacatactttatatagctattcacttctatacactaaaaaactaagacaattttaattttgctgcctgccatatttcaatttgttataaattcctataatttatcctattagtagctaaaaaaagatgaatgtgaatcgaatcctaagagaattcccctcgaagatcgatctggcggcccggccggccgcggccgcactcgagatatctagacccagctttcttgtacaaagtggtgatagcttgtcgagaagtactcgagggggggcccggtacccaattcgccctatagtgagtcgtattacgcgcgctcactggccgtcgttttacaacgtcgtgactgggaaaaccctggcgttacccaacttaatcgccttgcagcacatccccctttcgccagctggcgtaatagcgaagaggcccgcaccgatcgcccttcccaacagttgcgcagcctgaatggcgaatggacgcgccctgtagcggcgcattaagcgcggcgggtgtggtggttacgcgcagcgtgaccgctacacttgccagcgccctagcgcccgctcctttcgctttcttcccttcctttctcgccacgttcgccggctttccccgtcaagctctaaatcgggggctccctttagggttccgatttagtgctttacggcacctcgaccccaaaaaacttgattagggtgatggttcacgtagtgggccatcgccctgatagacggtttttcgccctttgacgttggagtccacgttctttaatagtggactcttgttccaaactggaacaacactcaaccctatctcggtctattcttttgatttataagggattttgccgatttcggcctattggttaaaaaatgagctgatttaacaaaaatttaacgcgaattttaacaaaatattaacgcttacaatttcctgatgcggtattttctccttacgcatctgtgcggtatttcacaccgcatagggtaataactgatataattaaattgaagctctaatttgtgagtttagtatacatgcatttacttataatacagttttttagttttgctggccgcatcttctcaaatatgcttcccagcctgcttttctgtaacgttcaccctctaccttagcatcccttccctttgcaaatagtcctcttccaacaataataatgtcagatcctgtagagaccacatcatccacggttctatactgttgacccaatgcgtctcccttgtcatctaaacccacaccgggtgtcataatcaaccaatcgtaaccttcatctcttccacccatgtctctttgagcaataaagccgataacaaaatctttgtcgctcttcgcaatgtcaacagtacccttagtatattctccagtagatagggagcccttgcatgacaattctgctaacatcaaaaggcctctaggttcctttgttacttcttctgccgcctgcttcaaaccgctaacaatacctgggcccaccacaccgtgtgcattcgtaatgtctgcccattctgctattctgtatacacccgcagagtactgcaatttgactgtattaccaatgtcagcaaattttctgtcttcgaagagtaaaaaattgtacttggcggataatgcctttagcggcttaactgtgccctccatggaaaaatcagtcaagatatccacatgtgtttttagtaaacaaattttgggacctaatgcttcaactaactccagtaattccttggtggtacgaacatccaatgaagcacacaagtttgtttgcttttcgtgcatgatattaaatagcttggcagcaacaggactaggatgagtagcagcacgttccttatatgtagctttcgacatgatttatcttcgtttcctgcaggtttttgttctgtgcagttgggttaagaatactgggcaatttcatgtttcttcaacactacatatgcgtatatataccaatctaagtctgtgctccttccttcgttcttccttctgttcggagattaccgaatcaaaaaaatttcaaggaaaccgaaatcaaaaaaaagaataaaaaaaaaatgatgaattgaaaaggtggtatggtgcactctcagtacaatctgctctgatgccgcatagttaagccagccccgacacccgccaacacccgctgacgcgccctgacgggcttgtctgctcccggcatccgcttacagacaagctgtgaccgtctccgggagctgcatgtgtcagaggttttcaccgtcatcaccgaaacgcgcga

SEQ ID NO: 3929 - RNA, 10311 nt, Saccharomyces cerevisiae
  source 1..10311: mol_type = other RNA
gacgaaagggcctcgtgatacgcctatttttataggttaatgtcatgataataatggtttcttagtatgatccaatatcaaaggaaatgatagcattgaaggatgagactaatccaattgaggagtggcagcatatagaacagctaaagggtagtgctgaaggaagcatacgataccccgcatggaatgggataatatcacaggaggtactagactacctttcatcctacataaatagacgcatataagtacgcatttaagcataaacacgcactatgccgttcttctcatgtatatatatatacaggcaacacgcagatataggtgcgacgtgaacagtgagctgtatgtgcgcagctcgcgttgcattttcggaagcgctcgttttcggaaacgctttgaagttcctattccgaagttcctattctctagaaagtataggaacttcagagcgcttttgaaaaccaaaagcgctctgaagacgcactttcaaaaaaccaaaaacgcaccggactgtaacgagctactaaaatattgcgaataccgcttccacaaacattgctcaaaagtatctctttgctatatatctctgtgctatatccctatataacctacccatccacctttcgctccttgaacttgcatctaaactcgacctctacattttttatgtttatctctagtattactctttagacaaaaaaattgtagtaagaactattcatagagtgaatcgaaaacaatacgaaaatgtaaacatttcctatacgtagtatatagagacaaaatagaagaaaccgttcataattttctgaccaatgaagaatcatcaacgctatcactttctgttcacaaagtatgcgcaatccacatcggtatagaatataatcggggatgcctttatcttgaaaaaatgcacccgcagcttcgctagtaatcagtaaacgcgggaagtggagtcaggctttttttatggaagagaaaatagacaccaaagtagccttcttctaaccttaacggacctacagtgcaaaaagttatcaagagactgcattatagagcgcacaaaggagaaaaaaagtaatctaagatgctttgttagaaaaatagcgctctcgggatgcatttttgtagaacaaaaaagaagtatagattctttgttggtaaaatagcgctctcgcgttgcatttctgttctgtaaaaatgcagctcagattctttgtttgaaaaattagcgctctcgcgttgcatttttgttttacaaaaatgaagcacagattcttcgttggtaaaatagcgctttcgcgttgcatttctgttctgtaaaaatgcagctcagattctttgtttgaaaaattagcgctctcgcgttgcatttttgttctacaaaatgaagcacagatgcttcgttcaggtggcacttttcggggaaatgtgcgcggaacccctatttgtttatttttctaaatacattcaaatatgtatccgctcatgagacaataaccctgataaatgcttcaataatattgaaaaaggaagagtatgagtattcaacatttccgtgtcgcccttattcccttttttgcggcattttgccttcctgtttttgctcacccagaaacgctggtgaaagtaaaagatgctgaagatcagttgggtgcacgagtgggttacatcgaactggatctcaacagcggtaagatccttgagagttttcgccccgaagaacgttttccaatgatgagcacttttaaagttctgctatgtggcgcggtattatcccgtattgacgccgggcaagagcaactcggtcgccgcatacactattctcagaatgacttggttgagtactcaccagtcacagaaaagcatcttacggatggcatgacagtaagagaattatgcagtgctgccataaccatgagtgataacactgcggccaacttacttctgacaacgatcggaggaccgaaggagctaaccgcttttttgcacaacatgggggatcatgtaactcgccttgatcgttgggaaccggagctgaatgaagccataccaaacgacgagcgtgacaccacgatgcctgtagcaatggcaacaacgttgcgcaaactattaactggcgaactacttactctagcttcccggcaacaattaatagactggatggaggcggataaagttgcaggaccacttctgcgctcggcccttccggctggctggtttattgctgataaatctggagccggtgagcgtgggtctcgcggtatcattgcagcactggggccagatggtaagccctcccgtatcgtagttatctacacgacggggagtcaggcaactatggatgaacgaaatagacagatcgctgagataggtgcctcactgattaagcattggtaactgtcagaccaagtttactcatatatactttagattgatttaaaacttcatttttaatttaaaaggatctaggtgaagatcctttttgataatctcatgaccaaaatcccttaacgtgagttttcgttccactgagcgtcagaccccgtagaaaagatcaaaggatcttcttgagatcctttttttctgcgcgtaatctgctgcttgcaaacaaaaaaaccaccgctaccagcggtggtttgtttgccggatcaagagctaccaactctttttccgaaggtaactggcttcagcagagcgcagataccaaatactgttcttctagtgtagccgtagttaggccaccacttcaagaactctgtagcaccgcctacatacctcgctctgctaatcctgttaccagtggctgctgccagtggcgataagtcgtgtcttaccgggttggactcaagacgatagttaccggataaggcgcagcggtcgggctgaacggggggttcgtgcacacagcccagcttggagcgaacgacctacaccgaactgagatacctacagcgtgagctatgagaaagcgccacgcttcccgaagggagaaaggcggacaggtatccggtaagcggcagggtcggaacaggagagcgcacgagggagcttccagggggaaacgcctggtatctttatagtcctgtcgggtttcgccacctctgacttgagcgtcgatttttgtgatgctcgtcaggggggcggagcctatggaaaaacgccagcaacgcggcctttttacggttcctggccttttgctggccttttgctcacatgttctttcctgcgttatcccctgattctgtggataaccgtattaccgcctttgagtgagctgataccgctcgccgcagccgaacgaccgagcgcagcgagtcagtgagcgaggaagcggaagagcgcccaatacgcaaaccgcctctccccgcgcgttggccgattcattaatgcagctggcacgacaggtttcccgactggaaagcgggcagtgagcgcaacgcaattaatgtgagttagctcactcattaggcaccccaggctttacactttatgcttccggctcgtatgttgtgtggaattgtgagcggataacaatttcacacaggaaacagctatgaccatgattacgccaagcgcgcaattaaccctcactaaagggaacaaaagctggagctccaccgcggtggcggcccccgtcccaccatcgggcgcggatcatcacaagtttgtacaaaaaagcaggctctttggccatataggccaccaggtcctgcaggcgcgctcttcaggaggcgcgccaactgccctcttaattaacgaagaagatcggaccggggccgcggatctttgcaaagatccaaaaaaagcatgcgtacggattagaagccgccgagcgggtgacagccctccgaaggaagactctcctccgtgcgtcctcgtcttcaccggtcgcgttcctgaaacgcagatgtgcctcgcgccgcactgctccgaacaataaagattctacaatactagcttttatggttatgaagaggaaaattggcagtaacctggccccacaaacctcaaatgaacgaatcaaattaacaaccagatatctcgactgaaaaaaaaggtttaaaccagttccctgaaattattcccctacttgactaataagtatataaagacggtaggtattgattgtaattctgtaaatctatttcttaaacttcttgaattctacttttatagttagtcttttttttagttttaaaacaccaagaacttagtttcgaataaacacacataaataaaccatgaaatcttctcaccatcaccatcaccatcaccatcaccatggttcttctatgaaaatcgaagaaggtaaactggtaatctggattaacggcgataaaggctataacggtctcgctgaagtcggtaagaaattcgagaaagataccggaattaaagtcaccgttgagcatccggataaactggaagagaaattcccacaggttgcggcaactggcgatggccctgacattatcttctgggcacacgaccgctttggtggctacgctcaatctggcctgttggctgaaatcaccccggacaaagcgttccaggacaagctgtatccgtttacctgggatgccgtacgttacaacggcaagctgattgcttacccgatcgctgttgaagcgttatcgctgatttataacaaagatctgctgccgaacccgccaaaaacctgggaagagatcccggcgctggataaagaactgaaagcgaaaggtaagagcgcgctgatgttcaacctgcaagaaccgtacttcacctggccgctgattgctgctgacgggggttatgcgttcaagtatgaaaacggcaagtacgacattaaagacgtgggcgtggataacgctggcgcgaaagcgggtctgaccttcctggttgacctgattaaaaacaaacacatgaatgcagacaccgattactccatcgcagaagctgcctttaataaaggcgaaacagcgatgaccatcaacggcccgtgggcatggtccaacatcgacaccagcaaagtgaattatggtgtaacggtactgccgaccttcaagggtcaaccatccaaaccgttcgttggcgtgctgagcgcaggtattaacgccgccagtccgaacaaagagctggcaaaagagttcctcgaaaactatctgctgactgatgaaggtctggaagcggttaataaagacaaaccgctgggtgccgtagcgctgaagtcttacgaggaagagttggcgaaagatccacgtattgccgccactatggaaaacgcccagaaaggtgaaatcatgccgaacatcccgcagatgtccgctttctggtatgccgtgcgtactgcggtgatcaacgccgccagcggtcgtcagactgtcgatgaagccctgaaagacgcgcagactaattcgagctcgaacaacaacaacaataacaataacaacaacctcgggatcgaggaaaacctgtacttccaatccaatgcaaagagaaaacgagaacagatgactttgtggaaagccgcgtttgtcaacgggcaggaaacgttcaagtcctggattgacaaggcacgaatgctggaattgaactgtgacgtctcttctgcaagctcgacacattactctgatctgaacttgaagacaaagtgtgccaagacagacgacaaatttatgtgtaattattctgtctgcatacgaccgacttctaagcagaagcgaacgttgaaccagatgctcaaggtgagcaactatgcttacaattggtgcaattacctagttaaggagaaagacttcaaaccgaagcagttcgacttgcaaagaattgtcgctaaaacgaattcaacagacgttccggccgaatacaggcttccaggagacgactggtttttcgacaacaagatgtcctctatcaagttgaccgcctgtaagaacttttgcaccatgtacaagtctactcaaaccaaccagaagaaaacaaaggtcgatctcagaaacaaagacattgttcagttacgcgaaggatcgtttgaagttcaaagcaagtacgtgagattgctaacggaaaaagacataccaggcgaacgaattcggcaatcgagaattgctttgatgccagacagtttttcgaaatcaaagaaggactggaaagaaaggtttctcaggctttcgaaaaatgtatctaagataccacctttgagtcacgacatgaaggtatgcaaacgtccgaatgggaaattcatactgcagatttcatgcgatccaatatgtactcgacagatacaagtgcaaacttcagattcgatatgttcaatcgatccgggaggcaggacttttgcgacatgctatgatcctagcaatataaagacatttcagatcggacccgaggcagacaaaaaggaaatcattcacgaatttcacaacaagatcgattatgttcaccgtctcttgtcgcatgctcaggagaaaaagcagacgcaagcggtgcaagacagaatcggacaactgaagaagctgcacctcaaactgaaaacgtacgtcgacgacgtgcacttgaaattgtgctcgtacctggtcaagaactacaaactggtcgttctcggcaagatatcggtttcgtccatcgtgagaaaagacaggccgaaccatcttgccaaaagcgctaacagggacttgctctgttggcagcactacagattcagacagagattgttacacagagtccgtggcacggactgcgaagtgatcatacaagacgaacgttacacttccaagacctgtggtaattgcggtgagaagaacaacaaactcggtggaaaggaaacgtttacttgtgaaagttgcaattacaaaactcatcgagacgtcaacggagcgagaaacattctgtgcaaatacttgggactttttccatttgcagcgtaacgaaagaaaaatgacaattaattgttcgggttcgattctatccccagggctcgaatgcatttttgtcacagattttgccaatgcaagatctgggggcaagaatgtctccgggtgaaaagagtcaggagaagtcatttaataaggccactgttaaaacgcctttccattttcggtatatataaaaacacaatgctttgacatttctcatgtatcatcgttttgaattacaagaggtttctgccgtattggacaaaatcatacaaagccagtgatgccatcatacattagctttcctatttaaaaaaactcgaatgtggacagtgttggcaaatttgtccaggtatacacaaatgcaatgttttgaaattccttatactatcatcacactgtcataggagaagtttctccctacattggacgctgaagtagaatgactttgctatcagacaagtagtaaaaaaatgttcaacaatatgtaatgcattactaatacaggagaaaattccaacataatgttgtttgttttccttctgatcgaaatttggaaaaagttagcagcaggatagtgagaaaatgataactatcctgtgacgcatcgggacaaaattccaacatgtagtacagtatgagatcggtaacatggatagacattcgatgcccttccccgtacatctaactgcggcgtccggacagttaggcaaccaaagagtgtattcgcacatctcattagaggaacgtcgtgcttccctttggcggggcaagagcatttaatccctgtccatgaatcctcgcagcgtcgggttaagcaattccctataccggcttcgctgcctcgccaaatatagagtcgggtcgttacaaccagcattacacttaacccatgccgatcagaaatccaaacaagagaggaaaaaatgctcaacaccatgtaaggactaggaaaaaattccaacatcatactattgcatcgaaaagcatttcaaatctctgagtaacgtttgcttaagtcgactttgttcccactgtacttttagctcgtacaaaatacaatatacttttcatttctccgtaaacaacatgttttcccatgtaatatccttttctatttttcgttccgttaccaactttacacatactttatatagctattcacttctatacactaaaaaactaagacaattttaattttgctgcctgccatatttcaatttgttataaattcctataatttatcctattagtagctaaaaaaagatgaatgtgaatcgaatcctaagagaattcccctcgaagatcgatctggcggcccggccggccgcggccgcactcgagatatctagacccagctttcttgtacaaagtggtgatagcttgtcgagaagtactcgagggggggcccggtacccaattcgccctatagtgagtcgtattacgcgcgctcactggccgtcgttttacaacgtcgtgactgggaaaaccctggcgttacccaacttaatcgccttgcagcacatccccctttcgccagctggcgtaatagcgaagaggcccgcaccgatcgcccttcccaacagttgcgcagcctgaatggcgaatggacgcgccctgtagcggcgcattaagcgcggcgggtgtggtggttacgcgcagcgtgaccgctacacttgccagcgccctagcgcccgctcctttcgctttcttcccttcctttctcgccacgttcgccggctttccccgtcaagctctaaatcgggggctccctttagggttccgatttagtgctttacggcacctcgaccccaaaaaacttgattagggtgatggttcacgtagtgggccatcgccctgatagacggtttttcgccctttgacgttggagtccacgttctttaatagtggactcttgttccaaactggaacaacactcaaccctatctcggtctattcttttgatttataagggattttgccgatttcggcctattggttaaaaaatgagctgatttaacaaaaatttaacgcgaattttaacaaaatattaacgcttacaatttcctgatgcggtattttctccttacgcatctgtgcggtatttcacaccgcatagggtaataactgatataattaaattgaagctctaatttgtgagtttagtatacatgcatttacttataatacagttttttagttttgctggccgcatcttctcaaatatgcttcccagcctgcttttctgtaacgttcaccctctaccttagcatcccttccctttgcaaatagtcctcttccaacaataataatgtcagatcctgtagagaccacatcatccacggttctatactgttgacccaatgcgtctcccttgtcatctaaacccacaccgggtgtcataatcaaccaatcgtaaccttcatctcttccacccatgtctctttgagcaataaagccgataacaaaatctttgtcgctcttcgcaatgtcaacagtacccttagtatattctccagtagatagggagcccttgcatgacaattctgctaacatcaaaaggcctctaggttcctttgttacttcttctgccgcctgcttcaaaccgctaacaatacctgggcccaccacaccgtgtgcattcgtaatgtctgcccattctgctattctgtatacacccgcagagtactgcaatttgactgtattaccaatgtcagcaaattttctgtcttcgaagagtaaaaaattgtacttggcggataatgcctttagcggcttaactgtgccctccatggaaaaatcagtcaagatatccacatgtgtttttagtaaacaaattttgggacctaatgcttcaactaactccagtaattccttggtggtacgaacatccaatgaagcacacaagtttgtttgcttttcgtgcatgatattaaatagcttggcagcaacaggactaggatgagtagcagcacgttccttatatgtagctttcgacatgatttatcttcgtttcctgcaggtttttgttctgtgcagttgggttaagaatactgggcaatttcatgtttcttcaacactacatatgcgtatatataccaatctaagtctgtgctccttccttcgttcttccttctgttcggagattaccgaatcaaaaaaatttcaaggaaaccgaaatcaaaaaaaagaataaaaaaaaaatgatgaattgaaaaggtggtatggtgcactctcagtacaatctgctctgatgccgcatagttaagccagccccgacacccgccaacacccgctgacgcgccctgacgggcttgtctgctcccggcatccgcttacagacaagctgtgaccgtctccgggagctgcatgtgtcagaggttttcaccgtcatcaccgaaacgcgcga

SEQ ID NO: 3930 - RNA, 2695 nt, unidentified
  misc_feature 1..2695: note = TAM library plasmid containing 8N + PSP1
  variation 1496..1503: note = n is a, c, g, t, or u
  source 1..2695: mol_type = other RNA
taaacttggtctgacagttaccaatgcttaatcagtgaggcacctatctcagcgatctgtctatttcgttcatccatagttgcctgactccccgtcgtgtagataactacgatacgggagggcttaccatctggccccagtgctgcaatgataccgcgagacccacgctcaccggctccagatttatcagcaataaaccagccagccggaagggccgagcgcagaagtggtcctgcaactttatccgcctccatccagtctattaattgttgccgggaagctagagtaagtagttcgccagttaatagtttgcgcaacgttgttgccattgctacaggcatcgtggtgtcacgctcgtcgtttggtatggcttcattcagctccggttcccaacgatcaaggcgagttacatgatcccccatgttgtgcaaaaaagcggttagctccttcggtcctccgatcgttgtcagaagtaagttggccgcagtgttatcactcatggttatggcagcactgcataattctcttactgtcatgccatccgtaagatgcttttctgtgactggtgagtactcaaccaagtcattctgagaatagtgtatgcggcgaccgagttgctcttgcccggcgtcaatacgggataataccgcgccacatagcagaactttaaaagtgctcatcattggaaaacgttcttcggggcgaaaactctcaaggatcttaccgctgttgagatccagttcgatgtaacccactcgtgcacccaactgatcttcagcatcttttactttcaccagcgtttctgggtgagcaaaaacaggaaggcaaaatgccgcaaaaaagggaataagggcgacacggaaatgttgaatactcatactcttcctttttcaatattattgaagcatttatcagggttattgtctcatgagcggatacatatttgaatgtatttagaaaaataaacaaataggggttccgcgcacatttccccgaaaagtgccacctgacgtctaagaaaccattattatcatgacattaacctataaaaataggcgtatcacgaggccctttcgtctcgcgcgtttcggtgatgacggtgaaaacctctgacacatgcagctcccggagacggtcacagcttgtctgtaagcggatgccgggagcagacaagcccgtcagggcgcgtcagcgggtgttggcgggtgtcggggctggcttaactatgcggcatcagagcagattgtactgagagtgcaccatatgcggtgtgaaataccgcacagatgcgtaaggagaaaataccgcatcaggcgccattcgccattcaggctgcgcaactgttgggaagggcgatcggtgcgggcctcttcgctattacgccagctggcgaaagggggatgtgctgcaaggcgattaagttgggtaacgccagggttttcccagtcacgacgttgtaaaacgacggccagtgaattcgagctcggtacccgggnnnnnnnngagaagtcatttaataaggccactgttaaaaagcttggcgtaatcatggtcatagctgtttcctgtgtgaaattgttatccgctcacaattccacacaacatacgagccggaagcataaagtgtaaagcctggggtgcctaatgagtgagctaactcacattaattgcgttgcgctcactgcccgctttccagtcgggaaacctgtcgtgccagctgcattaatgaatcggccaacgcgcggggagaggcggtttgcgtattgggcgctcttccgcttcctcgctcactgactcgctgcgctcggtcgttcggctgcggcgagcggtatcagctcactcaaaggcggtaatacggttatccacagaatcaggggataacgcaggaaagaacatgtgagcaaaaggccagcaaaaggccaggaaccgtaaaaaggccgcgttgctggcgtttttccataggctccgcccccctgacgagcatcacaaaaatcgacgctcaagtcagaggtggcgaaacccgacaggactataaagataccaggcgtttccccctggaagctccctcgtgcgctctcctgttccgaccctgccgcttaccggatacctgtccgcctttctcccttcgggaagcgtggcgctttctcatagctcacgctgtaggtatctcagttcggtgtaggtcgttcgctccaagctgggctgtgtgcacgaaccccccgttcagcccgaccgctgcgccttatccggtaactatcgtcttgagtccaacccggtaagacacgacttatcgccactggcagcagccactggtaacaggattagcagagcgaggtatgtaggcggtgctacagagttcttgaagtggtggcctaactacggctacactagaagaacagtatttggtatctgcgctctgctgaagccagttaccttcggaaaaagagttggtagctcttgatccggcaaacaaaccaccgctggtagcggtggtttttttgtttgcaagcagcagattacgcgcagaaaaaaaggatctcaagaagatcctttgatcttttctacggggtctgacgctcagtggaacgaaaactcacgttaagggattttggtcatgagattatcaaaaaggatcttcacctagatccttttaaattaaaaatgaagttttaaatcaatctaaagtatatatgag

SEQ ID NO: 3931 - RNA, 2695 nt, unidentified
  source 1..2695: mol_type = other RNA
  misc_feature 1..2695: note = Target for FZID16 (CATA+PSP1)
taaacttggtctgacagttaccaatgcttaatcagtgaggcacctatctcagcgatctgtctatttcgttcatccatagttgcctgactccccgtcgtgtagataactacgatacgggagggcttaccatctggccccagtgctgcaatgataccgcgagacccacgctcaccggctccagatttatcagcaataaaccagccagccggaagggccgagcgcagaagtggtcctgcaactttatccgcctccatccagtctattaattgttgccgggaagctagagtaagtagttcgccagttaatagtttgcgcaacgttgttgccattgctacaggcatcgtggtgtcacgctcgtcgtttggtatggcttcattcagctccggttcccaacgatcaaggcgagttacatgatcccccatgttgtgcaaaaaagcggttagctccttcggtcctccgatcgttgtcagaagtaagttggccgcagtgttatcactcatggttatggcagcactgcataattctcttactgtcatgccatccgtaagatgcttttctgtgactggtgagtactcaaccaagtcattctgagaatagtgtatgcggcgaccgagttgctcttgcccggcgtcaatacgggataataccgcgccacatagcagaactttaaaagtgctcatcattggaaaacgttcttcggggcgaaaactctcaaggatcttaccgctgttgagatccagttcgatgtaacccactcgtgcacccaactgatcttcagcatcttttactttcaccagcgtttctgggtgagcaaaaacaggaaggcaaaatgccgcaaaaaagggaataagggcgacacggaaatgttgaatactcatactcttcctttttcaatattattgaagcatttatcagggttattgtctcatgagcggatacatatttgaatgtatttagaaaaataaacaaataggggttccgcgcacatttccccgaaaagtgccacctgacgtctaagaaaccattattatcatgacattaacctataaaaataggcgtatcacgaggccctttcgtctcgcgcgtttcggtgatgacggtgaaaacctctgacacatgcagctcccggagacggtcacagcttgtctgtaagcggatgccgggagcagacaagcccgtcagggcgcgtcagcgggtgttggcgggtgtcggggctggcttaactatgcggcatcagagcagattgtactgagagtgcaccatatgcggtgtgaaataccgcacagatgcgtaaggagaaaataccgcatcaggcgccattcgccattcaggctgcgcaactgttgggaagggcgatcggtgcgggcctcttcgctattacgccagctggcgaaagggggatgtgctgcaaggcgattaagttgggtaacgccagggttttcccagtcacgacgttgtaaaacgacggccagtgaattcgagctcggtacccgggatcgcatagagaagtcatttaataaggccactgttaaaaagcttggcgtaatcatggtcatagctgtttcctgtgtgaaattgttatccgctcacaattccacacaacatacgagccggaagcataaagtgtaaagcctggggtgcctaatgagtgagctaactcacattaattgcgttgcgctcactgcccgctttccagtcgggaaacctgtcgtgccagctgcattaatgaatcggccaacgcgcggggagaggcggtttgcgtattgggcgctcttccgcttcctcgctcactgactcgctgcgctcggtcgttcggctgcggcgagcggtatcagctcactcaaaggcggtaatacggttatccacagaatcaggggataacgcaggaaagaacatgtgagcaaaaggccagcaaaaggccaggaaccgtaaaaaggccgcgttgctggcgtttttccataggctccgcccccctgacgagcatcacaaaaatcgacgctcaagtcagaggtggcgaaacccgacaggactataaagataccaggcgtttccccctggaagctccctcgtgcgctctcctgttccgaccctgccgcttaccggatacctgtccgcctttctcccttcgggaagcgtggcgctttctcatagctcacgctgtaggtatctcagttcggtgtaggtcgttcgctccaagctgggctgtgtgcacgaaccccccgttcagcccgaccgctgcgccttatccggtaactatcgtcttgagtccaacccggtaagacacgacttatcgccactggcagcagccactggtaacaggattagcagagcgaggtatgtaggcggtgctacagagttcttgaagtggtggcctaactacggctacactagaagaacagtatttggtatctgcgctctgctgaagccagttaccttcggaaaaagagttggtagctcttgatccggcaaacaaaccaccgctggtagcggtggtttttttgtttgcaagcagcagattacgcgcagaaaaaaaggatctcaagaagatcctttgatcttttctacggggtctgacgctcagtggaacgaaaactcacgttaagggattttggtcatgagattatcaaaaaggatcttcacctagatccttttaaattaaaaatgaagttttaaatcaatctaaagtatatatgag

SEQ ID NO: 3932 - RNA, 2695 nt, unidentified
  misc_feature 1..2695: note = Target for FZID35 (CCG+PSP1)
  source 1..2695: mol_type = other RNA
taaacttggtctgacagttaccaatgcttaatcagtgaggcacctatctcagcgatctgtctatttcgttcatccatagttgcctgactccccgtcgtgtagataactacgatacgggagggcttaccatctggccccagtgctgcaatgataccgcgagacccacgctcaccggctccagatttatcagcaataaaccagccagccggaagggccgagcgcagaagtggtcctgcaactttatccgcctccatccagtctattaattgttgccgggaagctagagtaagtagttcgccagttaatagtttgcgcaacgttgttgccattgctacaggcatcgtggtgtcacgctcgtcgtttggtatggcttcattcagctccggttcccaacgatcaaggcgagttacatgatcccccatgttgtgcaaaaaagcggttagctccttcggtcctccgatcgttgtcagaagtaagttggccgcagtgttatcactcatggttatggcagcactgcataattctcttactgtcatgccatccgtaagatgcttttctgtgactggtgagtactcaaccaagtcattctgagaatagtgtatgcggcgaccgagttgctcttgcccggcgtcaatacgggataataccgcgccacatagcagaactttaaaagtgctcatcattggaaaacgttcttcggggcgaaaactctcaaggatcttaccgctgttgagatccagttcgatgtaacccactcgtgcacccaactgatcttcagcatcttttactttcaccagcgtttctgggtgagcaaaaacaggaaggcaaaatgccgcaaaaaagggaataagggcgacacggaaatgttgaatactcatactcttcctttttcaatattattgaagcatttatcagggttattgtctcatgagcggatacatatttgaatgtatttagaaaaataaacaaataggggttccgcgcacatttccccgaaaagtgccacctgacgtctaagaaaccattattatcatgacattaacctataaaaataggcgtatcacgaggccctttcgtctcgcgcgtttcggtgatgacggtgaaaacctctgacacatgcagctcccggagacggtcacagcttgtctgtaagcggatgccgggagcagacaagcccgtcagggcgcgtcagcgggtgttggcgggtgtcggggctggcttaactatgcggcatcagagcagattgtactgagagtgcaccatatgcggtgtgaaataccgcacagatgcgtaaggagaaaataccgcatcaggcgccattcgccattcaggctgcgcaactgttgggaagggcgatcggtgcgggcctcttcgctattacgccagctggcgaaagggggatgtgctgcaaggcgattaagttgggtaacgccagggttttcccagtcacgacgttgtaaaacgacggccagtgaattcgagctcggtacccgggcgaacccggagaagtcatttaataaggccactgttaaaaagcttggcgtaatcatggtcatagctgtttcctgtgtgaaattgttatccgctcacaattccacacaacatacgagccggaagcataaagtgtaaagcctggggtgcctaatgagtgagctaactcacattaattgcgttgcgctcactgcccgctttccagtcgggaaacctgtcgtgccagctgcattaatgaatcggccaacgcgcggggagaggcggtttgcgtattgggcgctcttccgcttcctcgctcactgactcgctgcgctcggtcgttcggctgcggcgagcggtatcagctcactcaaaggcggtaatacggttatccacagaatcaggggataacgcaggaaagaacatgtgagcaaaaggccagcaaaaggccaggaaccgtaaaaaggccgcgttgctggcgtttttccataggctccgcccccctgacgagcatcacaaaaatcgacgctcaagtcagaggtggcgaaacccgacaggactataaagataccaggcgtttccccctggaagctccctcgtgcgctctcctgttccgaccctgccgcttaccggatacctgtccgcctttctcccttcgggaagcgtggcgctttctcatagctcacgctgtaggtatctcagttcggtgtaggtcgttcgctccaagctgggctgtgtgcacgaaccccccgttcagcccgaccgctgcgccttatccggtaactatcgtcttgagtccaacccggtaagacacgacttatcgccactggcagcagccactggtaacaggattagcagagcgaggtatgtaggcggtgctacagagttcttgaagtggtggcctaactacggctacactagaagaacagtatttggtatctgcgctctgctgaagccagttaccttcggaaaaagagttggtagctcttgatccggcaaacaaaccaccgctggtagcggtggtttttttgtttgcaagcagcagattacgcgcagaaaaaaaggatctcaagaagatcctttgatcttttctacggggtctgacgctcagtggaacgaaaactcacgttaagggattttggtcatgagattatcaaaaaggatcttcacctagatccttttaaattaaaaatgaagttttaaatcaatctaaagtatatatgag

SEQ ID NO: 3933 - RNA, 2695 nt, unidentified
  source 1..2695: mol_type = other RNA
  misc_feature 1..2695: note = Target for FZID83 (TTAAG+PSP1)
taaacttggtctgacagttaccaatgcttaatcagtgaggcacctatctcagcgatctgtctatttcgttcatccatagttgcctgactccccgtcgtgtagataactacgatacgggagggcttaccatctggccccagtgctgcaatgataccgcgagacccacgctcaccggctccagatttatcagcaataaaccagccagccggaagggccgagcgcagaagtggtcctgcaactttatccgcctccatccagtctattaattgttgccgggaagctagagtaagtagttcgccagttaatagtttgcgcaacgttgttgccattgctacaggcatcgtggtgtcacgctcgtcgtttggtatggcttcattcagctccggttcccaacgatcaaggcgagttacatgatcccccatgttgtgcaaaaaagcggttagctccttcggtcctccgatcgttgtcagaagtaagttggccgcagtgttatcactcatggttatggcagcactgcataattctcttactgtcatgccatccgtaagatgcttttctgtgactggtgagtactcaaccaagtcattctgagaatagtgtatgcggcgaccgagttgctcttgcccggcgtcaatacgggataataccgcgccacatagcagaactttaaaagtgctcatcattggaaaacgttcttcggggcgaaaactctcaaggatcttaccgctgttgagatccagttcgatgtaacccactcgtgcacccaactgatcttcagcatcttttactttcaccagcgtttctgggtgagcaaaaacaggaaggcaaaatgccgcaaaaaagggaataagggcgacacggaaatgttgaatactcatactcttcctttttcaatattattgaagcatttatcagggttattgtctcatgagcggatacatatttgaatgtatttagaaaaataaacaaataggggttccgcgcacatttccccgaaaagtgccacctgacgtctaagaaaccattattatcatgacattaacctataaaaataggcgtatcacgaggccctttcgtctcgcgcgtttcggtgatgacggtgaaaacctctgacacatgcagctcccggagacggtcacagcttgtctgtaagcggatgccgggagcagacaagcccgtcagggcgcgtcagcgggtgttggcgggtgtcggggctggcttaactatgcggcatcagagcagattgtactgagagtgcaccatatgcggtgtgaaataccgcacagatgcgtaaggagaaaataccgcatcaggcgccattcgccattcaggctgcgcaactgttgggaagggcgatcggtgcgggcctcttcgctattacgccagctggcgaaagggggatgtgctgcaaggcgattaagttgggtaacgccagggttttcccagtcacgacgttgtaaaacgacggccagtgaattcgagctcggtacccgggcatttaaggagaagtcatttaataaggccactgttaaaaagcttggcgtaatcatggtcatagctgtttcctgtgtgaaattgttatccgctcacaattccacacaacatacgagccggaagcataaagtgtaaagcctggggtgcctaatgagtgagctaactcacattaattgcgttgcgctcactgcccgctttccagtcgggaaacctgtcgtgccagctgcattaatgaatcggccaacgcgcggggagaggcggtttgcgtattgggcgctcttccgcttcctcgctcactgactcgctgcgctcggtcgttcggctgcggcgagcggtatcagctcactcaaaggcggtaatacggttatccacagaatcaggggataacgcaggaaagaacatgtgagcaaaaggccagcaaaaggccaggaaccgtaaaaaggccgcgttgctggcgtttttccataggctccgcccccctgacgagcatcacaaaaatcgacgctcaagtcagaggtggcgaaacccgacaggactataaagataccaggcgtttccccctggaagctccctcgtgcgctctcctgttccgaccctgccgcttaccggatacctgtccgcctttctcccttcgggaagcgtggcgctttctcatagctcacgctgtaggtatctcagttcggtgtaggtcgttcgctccaagctgggctgtgtgcacgaaccccccgttcagcccgaccgctgcgccttatccggtaactatcgtcttgagtccaacccggtaagacacgacttatcgccactggcagcagccactggtaacaggattagcagagcgaggtatgtaggcggtgctacagagttcttgaagtggtggcctaactacggctacactagaagaacagtatttggtatctgcgctctgctgaagccagttaccttcggaaaaagagttggtagctcttgatccggcaaacaaaccaccgctggtagcggtggtttttttgtttgcaagcagcagattacgcgcagaaaaaaaggatctcaagaagatcctttgatcttttctacggggtctgacgctcagtggaacgaaaactcacgttaagggattttggtcatgagattatcaaaaaggatcttcacctagatccttttaaattaaaaatgaagttttaaatcaatctaaagtatatatgag

SEQ ID NO: 3934 - RNA, 2695 nt, unidentified
  source 1..2695: mol_type = other RNA
  misc_feature 1..2695: note = Target for FZID88 (TAG+PSP1)
taaacttggtctgacagttaccaatgcttaatcagtgaggcacctatctcagcgatctgtctatttcgttcatccatagttgcctgactccccgtcgtgtagataactacgatacgggagggcttaccatctggccccagtgctgcaatgataccgcgagacccacgctcaccggctccagatttatcagcaataaaccagccagccggaagggccgagcgcagaagtggtcctgcaactttatccgcctccatccagtctattaattgttgccgggaagctagagtaagtagttcgccagttaatagtttgcgcaacgttgttgccattgctacaggcatcgtggtgtcacgctcgtcgtttggtatggcttcattcagctccggttcccaacgatcaaggcgagttacatgatcccccatgttgtgcaaaaaagcggttagctccttcggtcctccgatcgttgtcagaagtaagttggccgcagtgttatcactcatggttatggcagcactgcataattctcttactgtcatgccatccgtaagatgcttttctgtgactggtgagtactcaaccaagtcattctgagaatagtgtatgcggcgaccgagttgctcttgcccggcgtcaatacgggataataccgcgccacatagcagaactttaaaagtgctcatcattggaaaacgttcttcggggcgaaaactctcaaggatcttaccgctgttgagatccagttcgatgtaacccactcgtgcacccaactgatcttcagcatcttttactttcaccagcgtttctgggtgagcaaaaacaggaaggcaaaatgccgcaaaaaagggaataagggcgacacggaaatgttgaatactcatactcttcctttttcaatattattgaagcatttatcagggttattgtctcatgagcggatacatatttgaatgtatttagaaaaataaacaaataggggttccgcgcacatttccccgaaaagtgccacctgacgtctaagaaaccattattatcatgacattaacctataaaaataggcgtatcacgaggccctttcgtctcgcgcgtttcggtgatgacggtgaaaacctctgacacatgcagctcccggagacggtcacagcttgtctgtaagcggatgccgggagcagacaagcccgtcagggcgcgtcagcgggtgttggcgggtgtcggggctggcttaactatgcggcatcagagcagattgtactgagagtgcaccatatgcggtgtgaaataccgcacagatgcgtaaggagaaaataccgcatcaggcgccattcgccattcaggctgcgcaactgttgggaagggcgatcggtgcgggcctcttcgctattacgccagctggcgaaagggggatgtgctgcaaggcgattaagttgggtaacgccagggttttcccagtcacgacgttgtaaaacgacggccagtgaattcgagctcggtacccgggacgcttaggagaagtcatttaataaggccactgttaaaaagcttggcgtaatcatggtcatagctgtttcctgtgtgaaattgttatccgctcacaattccacacaacatacgagccggaagcataaagtgtaaagcctggggtgcctaatgagtgagctaactcacattaattgcgttgcgctcactgcccgctttccagtcgggaaacctgtcgtgccagctgcattaatgaatcggccaacgcgcggggagaggcggtttgcgtattgggcgctcttccgcttcctcgctcactgactcgctgcgctcggtcgttcggctgcggcgagcggtatcagctcactcaaaggcggtaatacggttatccacagaatcaggggataacgcaggaaagaacatgtgagcaaaaggccagcaaaaggccaggaaccgtaaaaaggccgcgttgctggcgtttttccataggctccgcccccctgacgagcatcacaaaaatcgacgctcaagtcagaggtggcgaaacccgacaggactataaagataccaggcgtttccccctggaagctccctcgtgcgctctcctgttccgaccctgccgcttaccggatacctgtccgcctttctcccttcgggaagcgtggcgctttctcatagctcacgctgtaggtatctcagttcggtgtaggtcgttcgctccaagctgggctgtgtgcacgaaccccccgttcagcccgaccgctgcgccttatccggtaactatcgtcttgagtccaacccggtaagacacgacttatcgccactggcagcagccactggtaacaggattagcagagcgaggtatgtaggcggtgctacagagttcttgaagtggtggcctaactacggctacactagaagaacagtatttggtatctgcgctctgctgaagccagttaccttcggaaaaagagttggtagctcttgatccggcaaacaaaccaccgctggtagcggtggtttttttgtttgcaagcagcagattacgcgcagaaaaaaaggatctcaagaagatcctttgatcttttctacggggtctgacgctcagtggaacgaaaactcacgttaagggattttggtcatgagattatcaaaaaggatcttcacctagatccttttaaattaaaaatgaagttttaaatcaatctaaagtatatatgag

SEQ ID NO: 3935 - RNA, 5630 nt, Homo sapiens
  source 1..5630: mol_type = other RNA
cgttacataacttacggtaaatggcccgcctggctgaccgcccaacgacccccgcccattgacgtcaataatgacgtatgttcccatagtaacgccaatagggactttccattgacgtcaatgggtggagtatttacggtaaactgcccacttggcagtacatcaagtgtatcatatgccaagtacgccccctattgacgtcaatgacggtaaatggcccgcctggcattatgcccagtacatgaccttatgggactttcctacttggcagtacatctacgtattagtcatcgctattaccatggtgatgcggttttggcagtacatcaatgggcgtggatagcggtttgactcacggggatttccaagtctccaccccattgacgtcaatgggagtttgttttggcaccaaaatcaacgggactttccaaaatgtcgtaacaactccgccccattgacgcaaatgggcggtaggcgtgtacggtgggaggtctatataagcagagctggtttagtgaaccgtcagatccgctagcgctaccggactcagatcgccaccatgccgcctaagaagaagcagaagctggaacggctgaagaaactggacaagcccacactgcacacctgtaacaagaccagcttcgccaaggccttcctgcctaacgagacataccggcagcggctgctggactatatcgccatcattcaccagctggccgaccacgcctctcacgccctgaagttttacatcctgagcacctccaccagcagcttccctgtggtgcacgaggataccatcgaggccatcctgtacctgctgaacaagggcgaagcctggcatcccagaaaagaggccaagaaggcctggcgggattgcctgctgccttacgtgcagagatactgccagatcgtgggcttcattcaccccaacctgagaggcgagcagcagagcatcaactacctgaccgtgtccatgatgaccaacctgaaagtgaacgtgcaagagcacttcatgcagatgctgctgcggtacatcaatctgcgcttcgacgtgaagggccagaagcagagactgcctcctaagagcgacgcccgcaaggcctttttcacccggctgagatacctgaagtccgtgttcctgttcgacgtggtgcccgagctggaattcctggacgatctgacccctctggaaagcgaggtgctggaagagatctggtccctggacctgccttttctgcccaacgatcctctggcctacgccatcgtggccgatcctatgagcttcttcccagcctactgcaagctgagcggcctgtacgagcagtacggcttccagcggtttagcgccattcctctgcggagaagcctgatccagtctcacgtgcggatcgacaccatcatcctgtatcagcacatcctgtgcatcaccagacgggacgccgagacagtggaaaaggacgacctgtggatgagagtgtgcaacctgtgcaccaaagccttccggtccagatgcggcatgcacttcgagggcagcatcacaacagatggcgccagcgtgtccgtgtacctgaaacaccctgaggccgataagtacggcaagagaggcgccagaaagtccgccaatactgtggccgccgaagtgaaggccctgtacgtggaaaacaacctgcctgcctgtagagccgccgagaacgtggtggtcatcgaccccaacaagcgggatatcctgtactgccaggacagcaacggcaccaccttcagatacaccgccaaccagagagccgtggaaaccggcagcagaagattcgccaagcggcgggaagccatgaaggaagaagccggcgttgacctgatcgagagcagaatccctagccacaagaccatgaacctgatggacttcaccagatacctgctcgtgcggagagccgactgggacagacggaaagagttctactctcaccccgctcacacccggtggaagtggcacagcttcatcaaccggcagaagtccgagagcgacctgatcagcaacatgcggaacaaatacggcgagaacttcaccgtggtcatgggcgattggagcgacgctggaagaaccgccagattccagaccagcagcaagaccaaaggctggcggaccctgttcaagcggaaccggatcgattgcttcctgctggacgagtacaagacctccagcgtgtgccctagatgcagcagcagcgagttcgtggaaaagaagttcaagacccggcctcacagcagaccctggcgaagaagagagggcaagatcgagaaggtgcacggcctgctgggctgcaccaatcctaattgtctgcagcaggcctggaccagcggcatgagatactggaaccgggacatgctgagcacatgcaacatgctgctgatcgtgcggtccatgctggatggccatggcagacctgaggtgttctctagatctgtgcctgccgtggcctgactagcataaccccttggggcgcactcctcaggtgcaggctgcctatcagaaggtggtggctggtgtggccaatgccctggctcacaaataccactgagatctttttccctctgccaaaaattatggggacatcatgaagccccttgagcatctgacttctggctaataaaggaaatttattttcattgcaatagtgtgttggaattttttgtgtctctcactcggaaggacatatgggagggcaaatcatttaaaacatcagaatgagtatttggtttagagtttggcaacatatgcccatatgctggctgccatgaacaaaggttggctataaagaggtcatcagtatatgaaacagccccctgctgtccattccttattccatagaaaagccttgacttgaggttagattttttttatattttgttttgtgttatttttttctttaacatccctaaaattttccttacatgttttactagccagatttttcctcctctcctgactactcccagtcatagctgtccctcttctcttatggagatccctcgacctgcagcccaagcttggcgtaatcatggtcatagctgtttcctgtgtgaaattgttatccgctcacaattccacacaacatacgagccggaagcataaagtgtaaagcctggggtgcctaatgagtgagctaactcacattaattgcgttgcgctcactgcccgctttccagtcgggaaacctgtcgtgccagcggatccgcatctcaattagtcagcaaccatagtcccgcccctaactccgcccatcccgcccctaactccgcccagttccgcccattctccgccccatggctgactaattttttttatttatgcagaggccgaggccgcctcggcctctgagctattccagaagtagtgaggaggcttttttggaggcctaggcttttgcaaaaagctaacttgtttattgcagcttataatggttacaaataaagcaatagcatcacaaatttcacaaataaagcatttttttcactgcattctagttgtggtttgtccaaactcatcaatgtatcttatcatgtctggatccgctgcattaatgaatcggccaacgcgcggggagaggcggtttgcgtattgggcgctcttccgcttcctcgctcactgactcgctgcgctcggtcgttcggctgcggcgagcggtatcagctcactcaaaggcggtaatacggttatccacagaatcaggggataacgcaggaaagaacatgtgagcaaaaggccagcaaaaggccaggaaccgtaaaaaggccgcgttgctggcgtttttccataggctccgcccccctgacgagcatcacaaaaatcgacgctcaagtcagaggtggcgaaacccgacaggactataaagataccaggcgtttccccctggaagctccctcgtgcgctctcctgttccgaccctgccgcttaccggatacctgtccgcctttctcccttcgggaagcgtggcgctttctcatagctcacgctgtaggtatctcagttcggtgtaggtcgttcgctccaagctgggctgtgtgcacgaaccccccgttcagcccgaccgctgcgccttatccggtaactatcgtcttgagtccaacccggtaagacacgacttatcgccactggcagcagccactggtaacaggattagcagagcgaggtatgtaggcggtgctacagagttcttgaagtggtggcctaactacggctacactagaagaacagtatttggtatctgcgctctgctgaagccagttaccttcggaaaaagagttggtagctcttgatccggcaaacaaaccaccgctggtagcggtggtttttttgtttgcaagcagcagattacgcgcagaaaaaaaggatctcaagaagatcctttgatcttttctacggggtctgacgctcagtggaacgaaaactcacgttaagggattttggtcatgagattatcaaaaaggatcttcacctagatccttttaaattaaaaatgaagttttaaatcaatctaaagtatatatgagtaaacttggtctgacagttaccaatgcttaatcagtgaggcacctatctcagcgatctgtctatttcgttcatccatagttgcctgactccccgtcgtgtagataactacgatacgggagggcttaccatctggccccagtgctgcaatgataccgcgagacccacgctcaccggctccagatttatcagcaataaaccagccagccggaagggccgagcgcagaagtggtcctgcaactttatccgcctccatccagtctattaattgttgccgggaagctagagtaagtagttcgccagttaatagtttgcgcaacgttgttgccattgctacaggcatcgtggtgtcacgctcgtcgtttggtatggcttcattcagctccggttcccaacgatcaaggcgagttacatgatcccccatgttgtgcaaaaaagcggttagctccttcggtcctccgatcgttgtcagaagtaagttggccgcagtgttatcactcatggttatggcagcactgcataattctcttactgtcatgccatccgtaagatgcttttctgtgactggtgagtactcaaccaagtcattctgagaatagtgtatgcggcgaccgagttgctcttgcccggcgtcaatacgggataataccgcgccacatagcagaactttaaaagtgctcatcattggaaaacgttcttcggggcgaaaactctcaaggatcttaccgctgttgagatccagttcgatgtaacccactcgtgcacccaactgatcttcagcatcttttactttcaccagcgtttctgggtgagcaaaaacaggaaggcaaaatgccgcaaaaaagggaataagggcgacacggaaatgttgaatactcatactcttcctttttcaatattattgaagcatttatcagggttattgtctcatgagcggatacatatttgaatgtatttagaaaaataaacaaataggggttccgcgcacatttccccgaaaagtgccacctgggtcgacattgattattgactagtaatagtaatcaattacggggtcattagttcatagcccatatatggagttccg

SEQ ID NO: 3936 - RNA, 3008 nt, Homo sapiens
  source 1..3008: mol_type = other RNA
aattctgtggaatgtgtgtcagttagggtgtggaaagtccccaggctccccagcaggcagaagtatgcaaagcatgcatctcaattagtcagcaaccaggtgtggaaagtccccaggctccccagcaggcagaagtatgcaaagcatgcatctcaattagtcagcaaccatagtcccgcccctaactccgcccatcccgcccctaactccgcccagttccgcccattctccgccccatggctgactaattttttttatttatgcagaggccgaggccgcctctgcctctgagctattccagaagtagtgaggaggcttttttggaggcctaggcttttgcaaaaagctaacttgtttattgcagcttataatggttacaaataaagcaatagcatcacaaatttcacaaataaagcatttttttcactgcattctagttgtggtttgtccaaactcatcaatgtatcttatcatgtctgtataccgtcgacctctagctagagcttggcgtaatcatggtcatagctgtttcctgtgtgaaattgttatccgctcacaattccacacaacatacgagccggaagcataaagtgtaaagcctggggtgcctaatgagtgagctaactcacattaattgcgttgcgctcactgcccgctttccagtcgggaaacctgtcgtgccagctgcattaatgaatcggccaacgcgcggggagaggcggtttgcgtattgggcgctcttccgcttcctcgctcactgactcgctgcgctcggtcgttcggctgcggcgagcggtatcagctcactcaaaggcggtaatacggttatccacagaatcaggggataacgcaggaaagaacatgtgagcaaaaggccagcaaaaggccaggaaccgtaaaaaggccgcgttgctggcgtttttccataggctccgcccccctgacgagcatcacaaaaatcgacgctcaagtcagaggtggcgaaacccgacaggactataaagataccaggcgtttccccctggaagctccctcgtgcgctctcctgttccgaccctgccgcttaccggatacctgtccgcctttctcccttcgggaagcgtggcgctttctcatagctcacgctgtaggtatctcagttcggtgtaggtcgttcgctccaagctgggctgtgtgcacgaaccccccgttcagcccgaccgctgcgccttatccggtaactatcgtcttgagtccaacccggtaagacacgacttatcgccactggcagcagccactggtaacaggattagcagagcgaggtatgtaggcggtgctacagagttcttgaagtggtggcctaactacggctacactagaagaacagtatttggtatctgcgctctgctgaagccagttaccttcggaaaaagagttggtagctcttgatccggcaaacaaaccaccgctggtagcggtttttttgtttgcaagcagcagattacgcgcagaaaaaaaggatctcaagaagatcctttgatcttttctacggggtctgacgctcagtggaacgaaaactcacgttaagggattttggtcatgagattatcaaaaaggatcttcacctagatccttttaaattaaaaatgaagttttaaatcaatctaaagtatatatgagtaaacttggtctgacagttaccaatgcttaatcagtgaggcacctatctcagcgatctgtctatttcgttcatccatagttgcctgactccccgtcgtgtagataactacgatacgggagggcttaccatctggccccagtgctgcaatgataccgcgagacccacgctcaccggctccagatttatcagcaataaaccagccagccggaagggccgagcgcagaagtggtcctgcaactttatccgcctccatccagtctattaattgttgccgggaagctagagtaagtagttcgccagttaatagtttgcgcaacgttgttgccattgctacaggcatcgtggtgtcacgctcgtcgtttggtatggcttcattcagctccggttcccaacgatcaaggcgagttacatgatcccccatgttgtgcaaaaaagcggttagctccttcggtcctccgatcgttgtcagaagtaagttggccgcagtgttatcactcatggttatggcagcactgcataattctcttactgtcatgccatccgtaagatgcttttctgtgactggtgagtactcaaccaagtcattctgagaatagtgtatgcggcgaccgagttgctcttgcccggcgtcaatacgggataataccgcgccacatagcagaactttaaaagtgctcatcattggaaaacgttcttcggggcgaaaactctcaaggatcttaccgctgttgagatccagttcgatgtaacccactcgtgcacccaactgatcttcagcatcttttactttcaccagcgtttctgggtgagcaaaaacaggaaggcaaaatgccgcaaaaaagggaataagggcgacacggaaatgttgaatactcatactcttcctttttcaatattattgaagcatttatcagggttattgtctcatgagcggatacatatttgaatgtatttagaaaaataaacaaataggggttccgcgcacatttccccgaaaagtgccacctgagggcctatttcccatgattccttcatatttgcatatacgatacaaggctgttagagagataattagaattaatttgactgtaaacacaaagatattagtacaaaatacgtgacgtagaaagtaataatttcttgggtagtttgcagttttaaaattatgttttaaaatggactatcatatgcttaccgtaacttgaaagtatttcgatttcttggctttatatatcttgtggaaaggacgttttccgagccggttgtcgcgcggttcaatccctggtgcgggtgctagtgccaatacccaccggctccgcactacagtcttctctgaagaccatttttt

SEQ ID NO: 3937 - RNA, 5183 nt, Homo sapiens
  source 1..5183: mol_type = other RNA
cgttacataacttacggtaaatggcccgcctggctgaccgcccaacgacccccgcccattgacgtcaataatgacgtatgttcccatagtaacgccaatagggactttccattgacgtcaatgggtggagtatttacggtaaactgcccacttggcagtacatcaagtgtatcatatgccaagtacgccccctattgacgtcaatgacggtaaatggcccgcctggcattatgcccagtacatgaccttatgggactttcctacttggcagtacatctacgtattagtcatcgctattaccatggtgatgcggttttggcagtacatcaatgggcgtggatagcggtttgactcacggggatttccaagtctccaccccattgacgtcaatgggagtttgttttggcaccaaaatcaacgggactttccaaaatgtcgtaacaactccgccccattgacgcaaatgggcggtaggcgtgtacggtgggaggtctatataagcagagctggtttagtgaaccgtcagatccgctagcgctaccggactcagatcgccaccatggaacctacacaccctcctacaaacccctctctggcccacggcatcatcccattctgggacgagtacagccagcaggtttccgacaagctgtgggcctgcagcagagacagcttccacgagttcaaccagtacaacaacaagggctgcaccgacggctggttcaacttcagccagttcaccgtgatcgagagccagcctgtgttcgacgtgcccctgaatgtgcaccacagcatcaccgagaacgtggccttcgacaacagcaagaagcctcctcagctgaagaaggccaagaagggccagaaaacccctcagaagttccaggccgacaagagcatgaagatccggctgtaccccaacgagcaagagcggaccacactgaaccagtggatgggcacagcccggtggatctacaacaagtgcctggaattcaccaacaagagcaagggcgtgaagaagaacaagaagaatttccggaccttcgtggtcaacaacgacaactaccagaccgagaatcagtgggtcgtgaacaccccttacgacgtgcgagatgccgccgctattgaactgctgaccgccttcaacaccaacttcgagaagaagaaagccggcaccatcgacaagttcatgatccggttccggcggaagaaggaccggaaggatcacttcgtgctgcggtgcaagcactggaagaaaaagtctggcatgtacagcttcatccggaacatcaagagcgccgagcctctgcctgaggaactgcagtacgacagcatcatcatcaagaacaagctgaaccactactacctgtgcataccccaggtgctggacatccggggagaaaatcaggcccctcagcactctggacaggtggtggctcttgatcctggcgtgcggaccttccagaccaccttcgatctgaacggctacagcacaaagtggggctctggcggagccgagagaatcggcagactgtgctgtgcctacgataagctgcagagcaagtggtcccagcctgaagtgcggcactgcaagcggtacaagtacaagagagccggcagacggatccagcagaaaatccgcaacatcgtggacgacctgcacaagaaactgtgcctgtggctgtgccggaactaccaagtgattctgctgcccagcttcgagacacagaagatggtcaagaagctgcaccggcggatcaactccaagaccgccagaaagatgctgacatggtcccactaccggttcaagcagcggctgctgcacaaggccagagaacacccttggacacacatctacatcgtgaacgaggcctacaccagcaagacctgcagctgttgtggccacgtgtacacagtcggcagcagcgaggtgttcagatgccctagctgtggcagcatcttcgaccgggacatcaacggcgccagaaatatcctgctgcggttcctgaccacacaccggatcagcttttgactagcataaccccttggggcgcactcctcaggtgcaggctgcctatcagaaggtggtggctggtgtggccaatgccctggctcacaaataccactgagatctttttccctctgccaaaaattatggggacatcatgaagccccttgagcatctgacttctggctaataaaggaaatttattttcattgcaatagtgtgttggaattttttgtgtctctcactcggaaggacatatgggagggcaaatcatttaaaacatcagaatgagtatttggtttagagtttggcaacatatgcccatatgctggctgccatgaacaaaggttggctataaagaggtcatcagtatatgaaacagccccctgctgtccattccttattccatagaaaagccttgacttgaggttagattttttttatattttgttttgtgttatttttttctttaacatccctaaaattttccttacatgttttactagccagatttttcctcctctcctgactactcccagtcatagctgtccctcttctcttatggagatccctcgacctgcagcccaagcttggcgtaatcatggtcatagctgtttcctgtgtgaaattgttatccgctcacaattccacacaacatacgagccggaagcataaagtgtaaagcctggggtgcctaatgagtgagctaactcacattaattgcgttgcgctcactgcccgctttccagtcgggaaacctgtcgtgccagcggatccgcatctcaattagtcagcaaccatagtcccgcccctaactccgcccatcccgcccctaactccgcccagttccgcccattctccgccccatggctgactaattttttttatttatgcagaggccgaggccgcctcggcctctgagctattccagaagtagtgaggaggcttttttggaggcctaggcttttgcaaaaagctaacttgtttattgcagcttataatggttacaaataaagcaatagcatcacaaatttcacaaataaagcatttttttcactgcattctagttgtggtttgtccaaactcatcaatgtatcttatcatgtctggatccgctgcattaatgaatcggccaacgcgcggggagaggcggtttgcgtattgggcgctcttccgcttcctcgctcactgactcgctgcgctcggtcgttcggctgcggcgagcggtatcagctcactcaaaggcggtaatacggttatccacagaatcaggggataacgcaggaaagaacatgtgagcaaaaggccagcaaaaggccaggaaccgtaaaaaggccgcgttgctggcgtttttccataggctccgcccccctgacgagcatcacaaaaatcgacgctcaagtcagaggtggcgaaacccgacaggactataaagataccaggcgtttccccctggaagctccctcgtgcgctctcctgttccgaccctgccgcttaccggatacctgtccgcctttctcccttcgggaagcgtggcgctttctcatagctcacgctgtaggtatctcagttcggtgtaggtcgttcgctccaagctgggctgtgtgcacgaaccccccgttcagcccgaccgctgcgccttatccggtaactatcgtcttgagtccaacccggtaagacacgacttatcgccactggcagcagccactggtaacaggattagcagagcgaggtatgtaggcggtgctacagagttcttgaagtggtggcctaactacggctacactagaagaacagtatttggtatctgcgctctgctgaagccagttaccttcggaaaaagagttggtagctcttgatccggcaaacaaaccaccgctggtagcggtggtttttttgtttgcaagcagcagattacgcgcagaaaaaaaggatctcaagaagatcctttgatcttttctacggggtctgacgctcagtggaacgaaaactcacgttaagggattttggtcatgagattatcaaaaaggatcttcacctagatccttttaaattaaaaatgaagttttaaatcaatctaaagtatatatgagtaaacttggtctgacagttaccaatgcttaatcagtgaggcacctatctcagcgatctgtctatttcgttcatccatagttgcctgactccccgtcgtgtagataactacgatacgggagggcttaccatctggccccagtgctgcaatgataccgcgagacccacgctcaccggctccagatttatcagcaataaaccagccagccggaagggccgagcgcagaagtggtcctgcaactttatccgcctccatccagtctattaattgttgccgggaagctagagtaagtagttcgccagttaatagtttgcgcaacgttgttgccattgctacaggcatcgtggtgtcacgctcgtcgtttggtatggcttcattcagctccggttcccaacgatcaaggcgagttacatgatcccccatgttgtgcaaaaaagcggttagctccttcggtcctccgatcgttgtcagaagtaagttggccgcagtgttatcactcatggttatggcagcactgcataattctcttactgtcatgccatccgtaagatgcttttctgtgactggtgagtactcaaccaagtcattctgagaatagtgtatgcggcgaccgagttgctcttgcccggcgtcaatacgggataataccgcgccacatagcagaactttaaaagtgctcatcattggaaaacgttcttcggggcgaaaactctcaaggatcttaccgctgttgagatccagttcgatgtaacccactcgtgcacccaactgatcttcagcatcttttactttcaccagcgtttctgggtgagcaaaaacaggaaggcaaaatgccgcaaaaaagggaataagggcgacacggaaatgttgaatactcatactcttcctttttcaatattattgaagcatttatcagggttattgtctcatgagcggatacatatttgaatgtatttagaaaaataaacaaataggggttccgcgcacatttccccgaaaagtgccacctgggtcgacattgattattgactagtaatagtaatcaattacggggtcattagttcatagcccatatatggagttccg

SEQ ID NO: 3938 - RNA, 3074 nt, Homo sapiens
  source 1..3074: mol_type = other RNA
aattctgtggaatgtgtgtcagttagggtgtggaaagtccccaggctccccagcaggcagaagtatgcaaagcatgcatctcaattagtcagcaaccaggtgtggaaagtccccaggctccccagcaggcagaagtatgcaaagcatgcatctcaattagtcagcaaccatagtcccgcccctaactccgcccatcccgcccctaactccgcccagttccgcccattctccgccccatggctgactaattttttttatttatgcagaggccgaggccgcctctgcctctgagctattccagaagtagtgaggaggcttttttggaggcctaggcttttgcaaaaagctaacttgtttattgcagcttataatggttacaaataaagcaatagcatcacaaatttcacaaataaagcatttttttcactgcattctagttgtggtttgtccaaactcatcaatgtatcttatcatgtctgtataccgtcgacctctagctagagcttggcgtaatcatggtcatagctgtttcctgtgtgaaattgttatccgctcacaattccacacaacatacgagccggaagcataaagtgtaaagcctggggtgcctaatgagtgagctaactcacattaattgcgttgcgctcactgcccgctttccagtcgggaaacctgtcgtgccagctgcattaatgaatcggccaacgcgcggggagaggcggtttgcgtattgggcgctcttccgcttcctcgctcactgactcgctgcgctcggtcgttcggctgcggcgagcggtatcagctcactcaaaggcggtaatacggttatccacagaatcaggggataacgcaggaaagaacatgtgagcaaaaggccagcaaaaggccaggaaccgtaaaaaggccgcgttgctggcgtttttccataggctccgcccccctgacgagcatcacaaaaatcgacgctcaagtcagaggtggcgaaacccgacaggactataaagataccaggcgtttccccctggaagctccctcgtgcgctctcctgttccgaccctgccgcttaccggatacctgtccgcctttctcccttcgggaagcgtggcgctttctcatagctcacgctgtaggtatctcagttcggtgtaggtcgttcgctccaagctgggctgtgtgcacgaaccccccgttcagcccgaccgctgcgccttatccggtaactatcgtcttgagtccaacccggtaagacacgacttatcgccactggcagcagccactggtaacaggattagcagagcgaggtatgtaggcggtgctacagagttcttgaagtggtggcctaactacggctacactagaagaacagtatttggtatctgcgctctgctgaagccagttaccttcggaaaaagagttggtagctcttgatccggcaaacaaaccaccgctggtagcggtttttttgtttgcaagcagcagattacgcgcagaaaaaaaggatctcaagaagatcctttgatcttttctacggggtctgacgctcagtggaacgaaaactcacgttaagggattttggtcatgagattatcaaaaaggatcttcacctagatccttttaaattaaaaatgaagttttaaatcaatctaaagtatatatgagtaaacttggtctgacagttaccaatgcttaatcagtgaggcacctatctcagcgatctgtctatttcgttcatccatagttgcctgactccccgtcgtgtagataactacgatacgggagggcttaccatctggccccagtgctgcaatgataccgcgagacccacgctcaccggctccagatttatcagcaataaaccagccagccggaagggccgagcgcagaagtggtcctgcaactttatccgcctccatccagtctattaattgttgccgggaagctagagtaagtagttcgccagttaatagtttgcgcaacgttgttgccattgctacaggcatcgtggtgtcacgctcgtcgtttggtatggcttcattcagctccggttcccaacgatcaaggcgagttacatgatcccccatgttgtgcaaaaaagcggttagctccttcggtcctccgatcgttgtcagaagtaagttggccgcagtgttatcactcatggttatggcagcactgcataattctcttactgtcatgccatccgtaagatgcttttctgtgactggtgagtactcaaccaagtcattctgagaatagtgtatgcggcgaccgagttgctcttgcccggcgtcaatacgggataataccgcgccacatagcagaactttaaaagtgctcatcattggaaaacgttcttcggggcgaaaactctcaaggatcttaccgctgttgagatccagttcgatgtaacccactcgtgcacccaactgatcttcagcatcttttactttcaccagcgtttctgggtgagcaaaaacaggaaggcaaaatgccgcaaaaaagggaataagggcgacacggaaatgttgaatactcatactcttcctttttcaatattattgaagcatttatcagggttattgtctcatgagcggatacatatttgaatgtatttagaaaaataaacaaataggggttccgcgcacatttccccgaaaagtgccacctgagggcctatttcccatgattccttcatatttgcatatacgatacaaggctgttagagagataattagaattaatttgactgtaaacacaaagatattagtacaaaatacgtgacgtagaaagtaataatttcttgggtagtttgcagttttaaaattatgttttaaaatggactatcatatgcttaccgtaacttgaaagtatttcgatttcttggctttatatatcttgtggaaaggacgagcaccttgtgtgttgggtcttccccaccttgtgtgcgttgggtcctttcccctggctttcactctttgagtgtttgcttgcaagatcagcactttgttcgatttgtttgttttgttcaaattgttgatttaaataaaggcgcgagacgacacgtctcatttttt

SEQ ID NO: 3939 - RNA, 5786 nt, Homo sapiens
  source 1..5786: mol_type = other RNA
cgttacataacttacggtaaatggcccgcctggctgaccgcccaacgacccccgcccattgacgtcaataatgacgtatgttcccatagtaacgccaatagggactttccattgacgtcaatgggtggagtatttacggtaaactgcccacttggcagtacatcaagtgtatcatatgccaagtacgccccctattgacgtcaatgacggtaaatggcccgcctggcattatgcccagtacatgaccttatgggactttcctacttggcagtacatctacgtattagtcatcgctattaccatggtgatgcggttttggcagtacatcaatgggcgtggatagcggtttgactcacggggatttccaagtctccaccccattgacgtcaatgggagtttgttttggcaccaaaatcaacgggactttccaaaatgtcgtaacaactccgccccattgacgcaaatgggcggtaggcgtgtacggtgggaggtctatataagcagagctggtttagtgaaccgtcagatccgctagcgctaccggactcagatcgccaccatgagcaacatccggatcgtgaagcggaaggccaagggcttcttcaagtgcgaggacctggtcaccatcaaggacgccgtgaaagccgctcaccggatcatgtctgatgccagcattctcgtgcggagctactacctgagatggttccagagcagctaccctctggacagcgacgacaaagagctggaactggaacacttccacatcagcatggcctgcagcatcgtgcagggcatcacaagacctccagttagaggcgtgggccctgagcagagcgtgaagatcgacgtgttcaacgacatgctggacgagtacaagcggctgtacgagagagcccctaacgacaaagaaaacgagacagacctgagcctgagccacgtgctggcctactccatcgacaatctgctgaccgcctacaagaacaacatcgaggcccacttcagcaaatacgtcaagcggttcatccgctgcgatatgctggccaagggattcaacaagtctgaggccaacagagtggccgccatctacaccaacgcctacatctacgacagcagcctggacctggaacctgacttcatggaacggctgggactcgaggccaccagctactctagcctgtttcctagcaagatcaacaaaggcggcttccccagagtgtacgacctgaaggctaacccctgggtgtacctgcctaagatggtcatgatcaatcaggccctggaaaccgacttctccagcgtggaacacaaagagcggcggctgctgaaccctctgcctttctacagcagcttcgtgcccatgcacatcagaatcgacaccagcggcctgtctcagctgctgatgaccaaggacagactggacgacttcaagagaagctacctggccgagttcggcgtgtccctgaacatcaagaacaaaggggacatgctcgccagcttcgagaagatctttggcagaaaggccacctccaatagagaggccggactgtacgctaccgagatgtggtccttcctgaccaacctgaaaacctgcaggcagtggaaagaactggacggcgtcgtgcggaagaacgaccctaagggaacccagtggatgttcgacaacgccgtggtcacagacggcgtcagcatcagcttccaagtgatcgacaacagcatgttcggccgcaaggccttcagcggccggaagaaaagagtggcctgtcaagaggccaacgacgaagaggacagcaagcaagtgacccgcgaggaactgaaaaccagcaagctgctgggctgcgaccccggcaagagagatatcctggccatcaccgacggcatcaagaccatctgctacaccaagggccagagagacatggacacccacaagacaatccggctgcggaccagcctgaagagaagaagaggttgcggcctggaagagtacgagacacaagtgatgaatcggttccagaagcggagctgtcaccccgagatgttcagaagatacgcctgcagccggaagcggatggaacacatgctgctggaatgctactctcaccccgtgttccgcgagttcaagttcctggtgtacaacaagaccaagagcagcgagcaccggttcatgcacagagtgctggaaaccttcaagcggccccagaccaatctgagcaaggccagatgtgccagcggcgtgatgagaatgaacgccctgaaagaggtgcagcggcacggcgatatcatcatcggctggggcaattggggcaagaaccccaacgctctgagatgctctgccggacctacacctggcatcggcatcagaagaagattcgagagcctgttcaagaccaccaccgtgcctgagcactacaccagccaagagtgccctagctgcaagggcagatgcctgagaaaagccaccggcaatcccatcatgcggcatcatctgctgcggtgcaccaacgatagctgctgctccagatggtggaaccggaatgtggctggcgccttcaacatcctgaccagactgctggatggccagacactgagcggcaatgagacaacaggcgacggactcggcggagatgatctgtgactagcataaccccttggggcgcactcctcaggtgcaggctgcctatcagaaggtggtggctggtgtggccaatgccctggctcacaaataccactgagatctttttccctctgccaaaaattatggggacatcatgaagccccttgagcatctgacttctggctaataaaggaaatttattttcattgcaatagtgtgttggaattttttgtgtctctcactcggaaggacatatgggagggcaaatcatttaaaacatcagaatgagtatttggtttagagtttggcaacatatgcccatatgctggctgccatgaacaaaggttggctataaagaggtcatcagtatatgaaacagccccctgctgtccattccttattccatagaaaagccttgacttgaggttagattttttttatattttgttttgtgttatttttttctttaacatccctaaaattttccttacatgttttactagccagatttttcctcctctcctgactactcccagtcatagctgtccctcttctcttatggagatccctcgacctgcagcccaagcttggcgtaatcatggtcatagctgtttcctgtgtgaaattgttatccgctcacaattccacacaacatacgagccggaagcataaagtgtaaagcctggggtgcctaatgagtgagctaactcacattaattgcgttgcgctcactgcccgctttccagtcgggaaacctgtcgtgccagcggatccgcatctcaattagtcagcaaccatagtcccgcccctaactccgcccatcccgcccctaactccgcccagttccgcccattctccgccccatggctgactaattttttttatttatgcagaggccgaggccgcctcggcctctgagctattccagaagtagtgaggaggcttttttggaggcctaggcttttgcaaaaagctaacttgtttattgcagcttataatggttacaaataaagcaatagcatcacaaatttcacaaataaagcatttttttcactgcattctagttgtggtttgtccaaactcatcaatgtatcttatcatgtctggatccgctgcattaatgaatcggccaacgcgcggggagaggcggtttgcgtattgggcgctcttccgcttcctcgctcactgactcgctgcgctcggtcgttcggctgcggcgagcggtatcagctcactcaaaggcggtaatacggttatccacagaatcaggggataacgcaggaaagaacatgtgagcaaaaggccagcaaaaggccaggaaccgtaaaaaggccgcgttgctggcgtttttccataggctccgcccccctgacgagcatcacaaaaatcgacgctcaagtcagaggtggcgaaacccgacaggactataaagataccaggcgtttccccctggaagctccctcgtgcgctctcctgttccgaccctgccgcttaccggatacctgtccgcctttctcccttcgggaagcgtggcgctttctcatagctcacgctgtaggtatctcagttcggtgtaggtcgttcgctccaagctgggctgtgtgcacgaaccccccgttcagcccgaccgctgcgccttatccggtaactatcgtcttgagtccaacccggtaagacacgacttatcgccactggcagcagccactggtaacaggattagcagagcgaggtatgtaggcggtgctacagagttcttgaagtggtggcctaactacggctacactagaagaacagtatttggtatctgcgctctgctgaagccagttaccttcggaaaaagagttggtagctcttgatccggcaaacaaaccaccgctggtagcggtggtttttttgtttgcaagcagcagattacgcgcagaaaaaaaggatctcaagaagatcctttgatcttttctacggggtctgacgctcagtggaacgaaaactcacgttaagggattttggtcatgagattatcaaaaaggatcttcacctagatccttttaaattaaaaatgaagttttaaatcaatctaaagtatatatgagtaaacttggtctgacagttaccaatgcttaatcagtgaggcacctatctcagcgatctgtctatttcgttcatccatagttgcctgactccccgtcgtgtagataactacgatacgggagggcttaccatctggccccagtgctgcaatgataccgcgagacccacgctcaccggctccagatttatcagcaataaaccagccagccggaagggccgagcgcagaagtggtcctgcaactttatccgcctccatccagtctattaattgttgccgggaagctagagtaagtagttcgccagttaatagtttgcgcaacgttgttgccattgctacaggcatcgtggtgtcacgctcgtcgtttggtatggcttcattcagctccggttcccaacgatcaaggcgagttacatgatcccccatgttgtgcaaaaaagcggttagctccttcggtcctccgatcgttgtcagaagtaagttggccgcagtgttatcactcatggttatggcagcactgcataattctcttactgtcatgccatccgtaagatgcttttctgtgactggtgagtactcaaccaagtcattctgagaatagtgtatgcggcgaccgagttgctcttgcccggcgtcaatacgggataataccgcgccacatagcagaactttaaaagtgctcatcattggaaaacgttcttcggggcgaaaactctcaaggatcttaccgctgttgagatccagttcgatgtaacccactcgtgcacccaactgatcttcagcatcttttactttcaccagcgtttctgggtgagcaaaaacaggaaggcaaaatgccgcaaaaaagggaataagggcgacacggaaatgttgaatactcatactcttcctttttcaatattattgaagcatttatcagggttattgtctcatgagcggatacatatttgaatgtatttagaaaaataaacaaataggggttccgcgcacatttccccgaaaagtgccacctgggtcgacattgattattgactagtaatagtaatcaattacggggtcattagttcatagcccatatatggagttccg

SEQ ID NO: 3940 - RNA, 3072 nt, Homo sapiens
  source 1..3072: mol_type = other RNA
aattctgtggaatgtgtgtcagttagggtgtggaaagtccccaggctccccagcaggcagaagtatgcaaagcatgcatctcaattagtcagcaaccaggtgtggaaagtccccaggctccccagcaggcagaagtatgcaaagcatgcatctcaattagtcagcaaccatagtcccgcccctaactccgcccatcccgcccctaactccgcccagttccgcccattctccgccccatggctgactaattttttttatttatgcagaggccgaggccgcctctgcctctgagctattccagaagtagtgaggaggcttttttggaggcctaggcttttgcaaaaagctaacttgtttattgcagcttataatggttacaaataaagcaatagcatcacaaatttcacaaataaagcatttttttcactgcattctagttgtggtttgtccaaactcatcaatgtatcttatcatgtctgtataccgtcgacctctagctagagcttggcgtaatcatggtcatagctgtttcctgtgtgaaattgttatccgctcacaattccacacaacatacgagccggaagcataaagtgtaaagcctggggtgcctaatgagtgagctaactcacattaattgcgttgcgctcactgcccgctttccagtcgggaaacctgtcgtgccagctgcattaatgaatcggccaacgcgcggggagaggcggtttgcgtattgggcgctcttccgcttcctcgctcactgactcgctgcgctcggtcgttcggctgcggcgagcggtatcagctcactcaaaggcggtaatacggttatccacagaatcaggggataacgcaggaaagaacatgtgagcaaaaggccagcaaaaggccaggaaccgtaaaaaggccgcgttgctggcgtttttccataggctccgcccccctgacgagcatcacaaaaatcgacgctcaagtcagaggtggcgaaacccgacaggactataaagataccaggcgtttccccctggaagctccctcgtgcgctctcctgttccgaccctgccgcttaccggatacctgtccgcctttctcccttcgggaagcgtggcgctttctcatagctcacgctgtaggtatctcagttcggtgtaggtcgttcgctccaagctgggctgtgtgcacgaaccccccgttcagcccgaccgctgcgccttatccggtaactatcgtcttgagtccaacccggtaagacacgacttatcgccactggcagcagccactggtaacaggattagcagagcgaggtatgtaggcggtgctacagagttcttgaagtggtggcctaactacggctacactagaagaacagtatttggtatctgcgctctgctgaagccagttaccttcggaaaaagagttggtagctcttgatccggcaaacaaaccaccgctggtagcggtttttttgtttgcaagcagcagattacgcgcagaaaaaaaggatctcaagaagatcctttgatcttttctacggggtctgacgctcagtggaacgaaaactcacgttaagggattttggtcatgagattatcaaaaaggatcttcacctagatccttttaaattaaaaatgaagttttaaatcaatctaaagtatatatgagtaaacttggtctgacagttaccaatgcttaatcagtgaggcacctatctcagcgatctgtctatttcgttcatccatagttgcctgactccccgtcgtgtagataactacgatacgggagggcttaccatctggccccagtgctgcaatgataccgcgagacccacgctcaccggctccagatttatcagcaataaaccagccagccggaagggccgagcgcagaagtggtcctgcaactttatccgcctccatccagtctattaattgttgccgggaagctagagtaagtagttcgccagttaatagtttgcgcaacgttgttgccattgctacaggcatcgtggtgtcacgctcgtcgtttggtatggcttcattcagctccggttcccaacgatcaaggcgagttacatgatcccccatgttgtgcaaaaaagcggttagctccttcggtcctccgatcgttgtcagaagtaagttggccgcagtgttatcactcatggttatggcagcactgcataattctcttactgtcatgccatccgtaagatgcttttctgtgactggtgagtactcaaccaagtcattctgagaatagtgtatgcggcgaccgagttgctcttgcccggcgtcaatacgggataataccgcgccacatagcagaactttaaaagtgctcatcattggaaaacgttcttcggggcgaaaactctcaaggatcttaccgctgttgagatccagttcgatgtaacccactcgtgcacccaactgatcttcagcatcttttactttcaccagcgtttctgggtgagcaaaaacaggaaggcaaaatgccgcaaaaaagggaataagggcgacacggaaatgttgaatactcatactcttcctttttcaatattattgaagcatttatcagggttattgtctcatgagcggatacatatttgaatgtatttagaaaaataaacaaataggggttccgcgcacatttccccgaaaagtgccacctgagggcctatttcccatgattccttcatatttgcatatacgatacaaggctgttagagagataattagaattaatttgactgtaaacacaaagatattagtacaaaatacgtgacgtagaaagtaataatttcttgggtagtttgcagttttaaaattatgttttaaaatggactatcatatgcttaccgtaacttgaaagtatttcgatttcttggctttatatatcttgtggaaaggaccactatccggtaacgaaactaccggagacgggttaggaggtgacgacctctaaaacctagaacttagagtgcaaaaacgccattacgattgtgatgcctattcaagggtgtcccaagtgtaaaaagaaagcactctaagcagtcttctctgaagaccatttttt

SEQ ID NO: 3941 - RNA, 5150 nt, Homo sapiens
  source 1..5150: mol_type = other RNA
cgttacataacttacggtaaatggcccgcctggctgaccgcccaacgacccccgcccattgacgtcaataatgacgtatgttcccatagtaacgccaatagggactttccattgacgtcaatgggtggagtatttacggtaaactgcccacttggcagtacatcaagtgtatcatatgccaagtacgccccctattgacgtcaatgacggtaaatggcccgcctggcattatgcccagtacatgaccttatgggactttcctacttggcagtacatctacgtattagtcatcgctattaccatggtgatgcggttttggcagtacatcaatgggcgtggatagcggtttgactcacggggatttccaagtctccaccccattgacgtcaatgggagtttgttttggcaccaaaatcaacgggactttccaaaatgtcgtaacaactccgccccattgacgcaaatgggcggtaggcgtgtacggtgggaggtctatataagcagagctggtttagtgaaccgtcagatccgctagcgctaccggactcagatcgccaccatgaagcggaagcgcgagcagatgacactgtggaaggccgccttcgtgaacggccaagagacattcaagagctggatcgacaaggcccggatgctggaactgaactgcgacgtgtccagcgccagcagcacacactacagcgacctgaacctgaaaacaaagtgcgccaagaccgacgacaagttcatgtgcaactacagcgtgtgcatcagacccaccagcaagcagaagcggaccctgaaccagatgctgaaggtgtccaactacgcctacaactggtgcaattacctggtcaaagagaaggacttcaagcccaagcagttcgacctgcagcggatcgtggccaagaccaacagcacagatgtgcccgccgagtacagactgcctggcgacgattggttcttcgacaacaagatgagcagcatcaagctgaccgcctgcaagaacttctgcaccatgtacaagagcacccagaccaaccagaaaaagaccaaggtggacctgcggaacaaggacatcgtgcagctgagagaaggcagcttcgaggtgcagagcaaatacgtgcggctgctgaccgagaaggacatccctggcgagagaatccggcagagcagaatcgccctgatgcctgacagcttcagcaagagcaagaaggactggaaagagcggttcctgcggctgagcaagaacgtgtccaagattcctccactgagccacgacatgaaagtgtgcaagcggcccaacggcaagttcatcctgcagatcagctgcgaccccatctgcaccagacagatccaggtgcagaccagcgacagcatctgcagcattgatcctggcggcagaaccttcgccacctgttacgaccccagcaacatcaagaccttccagatcggccctgaggccgacaagaaagagatcatccacgagttccacaacaaaatcgactacgtgcaccggctgctgtctcacgcccaagagaagaaacagacccaggccgtgcaggacagaatcggccagctgaagaagctgcatctgaagctcaagacctacgtggacgacgtgcacctgaaactgtgcagctacctcgtgaagaactacaagctggtggtgctgggcaagatcagcgtgtcctctatcgtgcggaaggacagacccaaccacctggccaagagcgccaacagagatctgctgtgctggcagcactaccggttcagacagaggctgctgcatagagtgcggggcaccgattgcgaagtgatcatccaggacgagcggtacacctccaagacctgcggcaattgcggcgagaagaacaacaaactcggcggcaaagaaacctttacctgcgagagctgcaattacaagacccaccgggatgtgaacggcgccagaaacatcctgtgcaagtatctgggactgttccccttcgccgcctgactagcataaccccttggggcgcactcctcaggtgcaggctgcctatcagaaggtggtggctggtgtggccaatgccctggctcacaaataccactgagatctttttccctctgccaaaaattatggggacatcatgaagccccttgagcatctgacttctggctaataaaggaaatttattttcattgcaatagtgtgttggaattttttgtgtctctcactcggaaggacatatgggagggcaaatcatttaaaacatcagaatgagtatttggtttagagtttggcaacatatgcccatatgctggctgccatgaacaaaggttggctataaagaggtcatcagtatatgaaacagccccctgctgtccattccttattccatagaaaagccttgacttgaggttagattttttttatattttgttttgtgttatttttttctttaacatccctaaaattttccttacatgttttactagccagatttttcctcctctcctgactactcccagtcatagctgtccctcttctcttatggagatccctcgacctgcagcccaagcttggcgtaatcatggtcatagctgtttcctgtgtgaaattgttatccgctcacaattccacacaacatacgagccggaagcataaagtgtaaagcctggggtgcctaatgagtgagctaactcacattaattgcgttgcgctcactgcccgctttccagtcgggaaacctgtcgtgccagcggatccgcatctcaattagtcagcaaccatagtcccgcccctaactccgcccatcccgcccctaactccgcccagttccgcccattctccgccccatggctgactaattttttttatttatgcagaggccgaggccgcctcggcctctgagctattccagaagtagtgaggaggcttttttggaggcctaggcttttgcaaaaagctaacttgtttattgcagcttataatggttacaaataaagcaatagcatcacaaatttcacaaataaagcatttttttcactgcattctagttgtggtttgtccaaactcatcaatgtatcttatcatgtctggatccgctgcattaatgaatcggccaacgcgcggggagaggcggtttgcgtattgggcgctcttccgcttcctcgctcactgactcgctgcgctcggtcgttcggctgcggcgagcggtatcagctcactcaaaggcggtaatacggttatccacagaatcaggggataacgcaggaaagaacatgtgagcaaaaggccagcaaaaggccaggaaccgtaaaaaggccgcgttgctggcgtttttccataggctccgcccccctgacgagcatcacaaaaatcgacgctcaagtcagaggtggcgaaacccgacaggactataaagataccaggcgtttccccctggaagctccctcgtgcgctctcctgttccgaccctgccgcttaccggatacctgtccgcctttctcccttcgggaagcgtggcgctttctcatagctcacgctgtaggtatctcagttcggtgtaggtcgttcgctccaagctgggctgtgtgcacgaaccccccgttcagcccgaccgctgcgccttatccggtaactatcgtcttgagtccaacccggtaagacacgacttatcgccactggcagcagccactggtaacaggattagcagagcgaggtatgtaggcggtgctacagagttcttgaagtggtggcctaactacggctacactagaagaacagtatttggtatctgcgctctgctgaagccagttaccttcggaaaaagagttggtagctcttgatccggcaaacaaaccaccgctggtagcggtggtttttttgtttgcaagcagcagattacgcgcagaaaaaaaggatctcaagaagatcctttgatcttttctacggggtctgacgctcagtggaacgaaaactcacgttaagggattttggtcatgagattatcaaaaaggatcttcacctagatccttttaaattaaaaatgaagttttaaatcaatctaaagtatatatgagtaaacttggtctgacagttaccaatgcttaatcagtgaggcacctatctcagcgatctgtctatttcgttcatccatagttgcctgactccccgtcgtgtagataactacgatacgggagggcttaccatctggccccagtgctgcaatgataccgcgagacccacgctcaccggctccagatttatcagcaataaaccagccagccggaagggccgagcgcagaagtggtcctgcaactttatccgcctccatccagtctattaattgttgccgggaagctagagtaagtagttcgccagttaatagtttgcgcaacgttgttgccattgctacaggcatcgtggtgtcacgctcgtcgtttggtatggcttcattcagctccggttcccaacgatcaaggcgagttacatgatcccccatgttgtgcaaaaaagcggttagctccttcggtcctccgatcgttgtcagaagtaagttggccgcagtgttatcactcatggttatggcagcactgcataattctcttactgtcatgccatccgtaagatgcttttctgtgactggtgagtactcaaccaagtcattctgagaatagtgtatgcggcgaccgagttgctcttgcccggcgtcaatacgggataataccgcgccacatagcagaactttaaaagtgctcatcattggaaaacgttcttcggggcgaaaactctcaaggatcttaccgctgttgagatccagttcgatgtaacccactcgtgcacccaactgatcttcagcatcttttactttcaccagcgtttctgggtgagcaaaaacaggaaggcaaaatgccgcaaaaaagggaataagggcgacacggaaatgttgaatactcatactcttcctttttcaatattattgaagcatttatcagggttattgtctcatgagcggatacatatttgaatgtatttagaaaaataaacaaataggggttccgcgcacatttccccgaaaagtgccacctgggtcgacattgattattgactagtaatagtaatcaattacggggtcattagttcatagcccatatatggagttccg

SEQ ID NO: 3942 - RNA, 3034 nt, Homo sapiens
  source 1..3034: mol_type = other RNA
aattctgtggaatgtgtgtcagttagggtgtggaaagtccccaggctccccagcaggcagaagtatgcaaagcatgcatctcaattagtcagcaaccaggtgtggaaagtccccaggctccccagcaggcagaagtatgcaaagcatgcatctcaattagtcagcaaccatagtcccgcccctaactccgcccatcccgcccctaactccgcccagttccgcccattctccgccccatggctgactaattttttttatttatgcagaggccgaggccgcctctgcctctgagctattccagaagtagtgaggaggcttttttggaggcctaggcttttgcaaaaagctaacttgtttattgcagcttataatggttacaaataaagcaatagcatcacaaatttcacaaataaagcatttttttcactgcattctagttgtggtttgtccaaactcatcaatgtatcttatcatgtctgtataccgtcgacctctagctagagcttggcgtaatcatggtcatagctgtttcctgtgtgaaattgttatccgctcacaattccacacaacatacgagccggaagcataaagtgtaaagcctggggtgcctaatgagtgagctaactcacattaattgcgttgcgctcactgcccgctttccagtcgggaaacctgtcgtgccagctgcattaatgaatcggccaacgcgcggggagaggcggtttgcgtattgggcgctcttccgcttcctcgctcactgactcgctgcgctcggtcgttcggctgcggcgagcggtatcagctcactcaaaggcggtaatacggttatccacagaatcaggggataacgcaggaaagaacatgtgagcaaaaggccagcaaaaggccaggaaccgtaaaaaggccgcgttgctggcgtttttccataggctccgcccccctgacgagcatcacaaaaatcgacgctcaagtcagaggtggcgaaacccgacaggactataaagataccaggcgtttccccctggaagctccctcgtgcgctctcctgttccgaccctgccgcttaccggatacctgtccgcctttctcccttcgggaagcgtggcgctttctcatagctcacgctgtaggtatctcagttcggtgtaggtcgttcgctccaagctgggctgtgtgcacgaaccccccgttcagcccgaccgctgcgccttatccggtaactatcgtcttgagtccaacccggtaagacacgacttatcgccactggcagcagccactggtaacaggattagcagagcgaggtatgtaggcggtgctacagagttcttgaagtggtggcctaactacggctacactagaagaacagtatttggtatctgcgctctgctgaagccagttaccttcggaaaaagagttggtagctcttgatccggcaaacaaaccaccgctggtagcggtttttttgtttgcaagcagcagattacgcgcagaaaaaaaggatctcaagaagatcctttgatcttttctacggggtctgacgctcagtggaacgaaaactcacgttaagggattttggtcatgagattatcaaaaaggatcttcacctagatccttttaaattaaaaatgaagttttaaatcaatctaaagtatatatgagtaaacttggtctgacagttaccaatgcttaatcagtgaggcacctatctcagcgatctgtctatttcgttcatccatagttgcctgactccccgtcgtgtagataactacgatacgggagggcttaccatctggccccagtgctgcaatgataccgcgagacccacgctcaccggctccagatttatcagcaataaaccagccagccggaagggccgagcgcagaagtggtcctgcaactttatccgcctccatccagtctattaattgttgccgggaagctagagtaagtagttcgccagttaatagtttgcgcaacgttgttgccattgctacaggcatcgtggtgtcacgctcgtcgtttggtatggcttcattcagctccggttcccaacgatcaaggcgagttacatgatcccccatgttgtgcaaaaaagcggttagctccttcggtcctccgatcgttgtcagaagtaagttggccgcagtgttatcactcatggttatggcagcactgcataattctcttactgtcatgccatccgtaagatgcttttctgtgactggtgagtactcaaccaagtcattctgagaatagtgtatgcggcgaccgagttgctcttgcccggcgtcaatacgggataataccgcgccacatagcagaactttaaaagtgctcatcattggaaaacgttcttcggggcgaaaactctcaaggatcttaccgctgttgagatccagttcgatgtaacccactcgtgcacccaactgatcttcagcatcttttactttcaccagcgtttctgggtgagcaaaaacaggaaggcaaaatgccgcaaaaaagggaataagggcgacacggaaatgttgaatactcatactcttcctttttcaatattattgaagcatttatcagggttattgtctcatgagcggatacatatttgaatgtatttagaaaaataaacaaataggggttccgcgcacatttccccgaaaagtgccacctgagggcctatttcccatgattccttcatatttgcatatacgatacaaggctgttagagagataattagaattaatttgactgtaaacacaaagatattagtacaaaatacgtgacgtagaaagtaataatttcttgggtagtttgcagttttaaaattatgttttaaaatggactatcatatgcttaccgtaacttgaaagtatttcgatttcttggctttatatatcttgtggaaaggacttcgggttcgattctatccccagggctcgaatgcatttttgtcacagattttgccaatgcaagatctgggggcaagaatgtctccgggtgaaaagagtcagcagtcttctctgaagaccatttttt

SEQ ID NO: 3943 - RNA, 3095 nt, Homo sapiens
  source 1..3095: mol_type = other RNA
aattctgtggaatgtgtgtcagttagggtgtggaaagtccccaggctccccagcaggcagaagtatgcaaagcatgcatctcaattagtcagcaaccaggtgtggaaagtccccaggctccccagcaggcagaagtatgcaaagcatgcatctcaattagtcagcaaccatagtcccgcccctaactccgcccatcccgcccctaactccgcccagttccgcccattctccgccccatggctgactaattttttttatttatgcagaggccgaggccgcctctgcctctgagctattccagaagtagtgaggaggcttttttggaggcctaggcttttgcaaaaagctaacttgtttattgcagcttataatggttacaaataaagcaatagcatcacaaatttcacaaataaagcatttttttcactgcattctagttgtggtttgtccaaactcatcaatgtatcttatcatgtctgtataccgtcgacctctagctagagcttggcgtaatcatggtcatagctgtttcctgtgtgaaattgttatccgctcacaattccacacaacatacgagccggaagcataaagtgtaaagcctggggtgcctaatgagtgagctaactcacattaattgcgttgcgctcactgcccgctttccagtcgggaaacctgtcgtgccagctgcattaatgaatcggccaacgcgcggggagaggcggtttgcgtattgggcgctcttccgcttcctcgctcactgactcgctgcgctcggtcgttcggctgcggcgagcggtatcagctcactcaaaggcggtaatacggttatccacagaatcaggggataacgcaggaaagaacatgtgagcaaaaggccagcaaaaggccaggaaccgtaaaaaggccgcgttgctggcgtttttccataggctccgcccccctgacgagcatcacaaaaatcgacgctcaagtcagaggtggcgaaacccgacaggactataaagataccaggcgtttccccctggaagctccctcgtgcgctctcctgttccgaccctgccgcttaccggatacctgtccgcctttctcccttcgggaagcgtggcgctttctcatagctcacgctgtaggtatctcagttcggtgtaggtcgttcgctccaagctgggctgtgtgcacgaaccccccgttcagcccgaccgctgcgccttatccggtaactatcgtcttgagtccaacccggtaagacacgacttatcgccactggcagcagccactggtaacaggattagcagagcgaggtatgtaggcggtgctacagagttcttgaagtggtggcctaactacggctacactagaagaacagtatttggtatctgcgctctgctgaagccagttaccttcggaaaaagagttggtagctcttgatccggcaaacaaaccaccgctggtagcggtttttttgtttgcaagcagcagattacgcgcagaaaaaaaggatctcaagaagatcctttgatcttttctacggggtctgacgctcagtggaacgaaaactcacgttaagggattttggtcatgagattatcaaaaaggatcttcacctagatccttttaaattaaaaatgaagttttaaatcaatctaaagtatatatgagtaaacttggtctgacagttaccaatgcttaatcagtgaggcacctatctcagcgatctgtctatttcgttcatccatagttgcctgactccccgtcgtgtagataactacgatacgggagggcttaccatctggccccagtgctgcaatgataccgcgagacccacgctcaccggctccagatttatcagcaataaaccagccagccggaagggccgagcgcagaagtggtcctgcaactttatccgcctccatccagtctattaattgttgccgggaagctagagtaagtagttcgccagttaatagtttgcgcaacgttgttgccattgctacaggcatcgtggtgtcacgctcgtcgtttggtatggcttcattcagctccggttcccaacgatcaaggcgagttacatgatcccccatgttgtgcaaaaaagcggttagctccttcggtcctccgatcgttgtcagaagtaagttggccgcagtgttatcactcatggttatggcagcactgcataattctcttactgtcatgccatccgtaagatgcttttctgtgactggtgagtactcaaccaagtcattctgagaatagtgtatgcggcgaccgagttgctcttgcccggcgtcaatacgggataataccgcgccacatagcagaactttaaaagtgctcatcattggaaaacgttcttcggggcgaaaactctcaaggatcttaccgctgttgagatccagttcgatgtaacccactcgtgcacccaactgatcttcagcatcttttactttcaccagcgtttctgggtgagcaaaaacaggaaggcaaaatgccgcaaaaaagggaataagggcgacacggaaatgttgaatactcatactcttcctttttcaatattattgaagcatttatcagggttattgtctcatgagcggatacatatttgaatgtatttagaaaaataaacaaataggggttccgcgcacatttccccgaaaagtgccacctgagggcctatttcccatgattccttcatatttgcatatacgatacaaggctgttagagagataattagaattaatttgactgtaaacacaaagatattagtacaaaatacgtgacgtagaaagtaataatttcttgggtagtttgcagttttaaaattatgttttaaaatggactatcatatgcttaccgtaacttgaaagtatttcgatttcttggctttatatatcttgtggaaaggacagatcaatgttggatggacacggtagaccagaagtgttcagcaggagtgttccagccgtagcgtagaacgtagattggttagattaggttttccgagccggttgtcgcgcggttcaatccctggtgcgggtgctagtgccaatacccaccggctccgcactacagtcttctctgaagaccatttttt

SEQ ID NO: 3944 - RNA, 3134 nt, Homo sapiens
  source 1..3134: mol_type = other RNA
aattctgtggaatgtgtgtcagttagggtgtggaaagtccccaggctccccagcaggcagaagtatgcaaagcatgcatctcaattagtcagcaaccaggtgtggaaagtccccaggctccccagcaggcagaagtatgcaaagcatgcatctcaattagtcagcaaccatagtcccgcccctaactccgcccatcccgcccctaactccgcccagttccgcccattctccgccccatggctgactaattttttttatttatgcagaggccgaggccgcctctgcctctgagctattccagaagtagtgaggaggcttttttggaggcctaggcttttgcaaaaagctaacttgtttattgcagcttataatggttacaaataaagcaatagcatcacaaatttcacaaataaagcatttttttcactgcattctagttgtggtttgtccaaactcatcaatgtatcttatcatgtctgtataccgtcgacctctagctagagcttggcgtaatcatggtcatagctgtttcctgtgtgaaattgttatccgctcacaattccacacaacatacgagccggaagcataaagtgtaaagcctggggtgcctaatgagtgagctaactcacattaattgcgttgcgctcactgcccgctttccagtcgggaaacctgtcgtgccagctgcattaatgaatcggccaacgcgcggggagaggcggtttgcgtattgggcgctcttccgcttcctcgctcactgactcgctgcgctcggtcgttcggctgcggcgagcggtatcagctcactcaaaggcggtaatacggttatccacagaatcaggggataacgcaggaaagaacatgtgagcaaaaggccagcaaaaggccaggaaccgtaaaaaggccgcgttgctggcgtttttccataggctccgcccccctgacgagcatcacaaaaatcgacgctcaagtcagaggtggcgaaacccgacaggactataaagataccaggcgtttccccctggaagctccctcgtgcgctctcctgttccgaccctgccgcttaccggatacctgtccgcctttctcccttcgggaagcgtggcgctttctcatagctcacgctgtaggtatctcagttcggtgtaggtcgttcgctccaagctgggctgtgtgcacgaaccccccgttcagcccgaccgctgcgccttatccggtaactatcgtcttgagtccaacccggtaagacacgacttatcgccactggcagcagccactggtaacaggattagcagagcgaggtatgtaggcggtgctacagagttcttgaagtggtggcctaactacggctacactagaagaacagtatttggtatctgcgctctgctgaagccagttaccttcggaaaaagagttggtagctcttgatccggcaaacaaaccaccgctggtagcggtttttttgtttgcaagcagcagattacgcgcagaaaaaaaggatctcaagaagatcctttgatcttttctacggggtctgacgctcagtggaacgaaaactcacgttaagggattttggtcatgagattatcaaaaaggatcttcacctagatccttttaaattaaaaatgaagttttaaatcaatctaaagtatatatgagtaaacttggtctgacagttaccaatgcttaatcagtgaggcacctatctcagcgatctgtctatttcgttcatccatagttgcctgactccccgtcgtgtagataactacgatacgggagggcttaccatctggccccagtgctgcaatgataccgcgagacccacgctcaccggctccagatttatcagcaataaaccagccagccggaagggccgagcgcagaagtggtcctgcaactttatccgcctccatccagtctattaattgttgccgggaagctagagtaagtagttcgccagttaatagtttgcgcaacgttgttgccattgctacaggcatcgtggtgtcacgctcgtcgtttggtatggcttcattcagctccggttcccaacgatcaaggcgagttacatgatcccccatgttgtgcaaaaaagcggttagctccttcggtcctccgatcgttgtcagaagtaagttggccgcagtgttatcactcatggttatggcagcactgcataattctcttactgtcatgccatccgtaagatgcttttctgtgactggtgagtactcaaccaagtcattctgagaatagtgtatgcggcgaccgagttgctcttgcccggcgtcaatacgggataataccgcgccacatagcagaactttaaaagtgctcatcattggaaaacgttcttcggggcgaaaactctcaaggatcttaccgctgttgagatccagttcgatgtaacccactcgtgcacccaactgatcttcagcatcttttactttcaccagcgtttctgggtgagcaaaaacaggaaggcaaaatgccgcaaaaaagggaataagggcgacacggaaatgttgaatactcatactcttcctttttcaatattattgaagcatttatcagggttattgtctcatgagcggatacatatttgaatgtatttagaaaaataaacaaataggggttccgcgcacatttccccgaaaagtgccacctgagggcctatttcccatgattccttcatatttgcatatacgatacaaggctgttagagagataattagaattaatttgactgtaaacacaaagatattagtacaaaatacgtgacgtagaaagtaataatttcttgggtagtttgcagttttaaaattatgttttaaaatggactatcatatgcttaccgtaacttgaaagtatttcgatttcttggctttatatatcttgtggaaaggaccgagatatgctgtcaacctgcaacatgctattgattgtgagatcaatgttggatggacacggtagaccagaagtgttcagcaggagtgttccagccgtagcgtagaacgtagattggttagattaggttttccgagccggttgtcgcgcggttcaatccctggtgcgggtgctagtgccaatacccaccggctccgcactacagtcttctctgaagaccatttttt

SEQ ID NO: 3945 - RNA, 3209 nt, Homo sapiens
  source 1..3209: mol_type = other RNA
aattctgtggaatgtgtgtcagttagggtgtggaaagtccccaggctccccagcaggcagaagtatgcaaagcatgcatctcaattagtcagcaaccaggtgtggaaagtccccaggctccccagcaggcagaagtatgcaaagcatgcatctcaattagtcagcaaccatagtcccgcccctaactccgcccatcccgcccctaactccgcccagttccgcccattctccgccccatggctgactaattttttttatttatgcagaggccgaggccgcctctgcctctgagctattccagaagtagtgaggaggcttttttggaggcctaggcttttgcaaaaagctaacttgtttattgcagcttataatggttacaaataaagcaatagcatcacaaatttcacaaataaagcatttttttcactgcattctagttgtggtttgtccaaactcatcaatgtatcttatcatgtctgtataccgtcgacctctagctagagcttggcgtaatcatggtcatagctgtttcctgtgtgaaattgttatccgctcacaattccacacaacatacgagccggaagcataaagtgtaaagcctggggtgcctaatgagtgagctaactcacattaattgcgttgcgctcactgcccgctttccagtcgggaaacctgtcgtgccagctgcattaatgaatcggccaacgcgcggggagaggcggtttgcgtattgggcgctcttccgcttcctcgctcactgactcgctgcgctcggtcgttcggctgcggcgagcggtatcagctcactcaaaggcggtaatacggttatccacagaatcaggggataacgcaggaaagaacatgtgagcaaaaggccagcaaaaggccaggaaccgtaaaaaggccgcgttgctggcgtttttccataggctccgcccccctgacgagcatcacaaaaatcgacgctcaagtcagaggtggcgaaacccgacaggactataaagataccaggcgtttccccctggaagctccctcgtgcgctctcctgttccgaccctgccgcttaccggatacctgtccgcctttctcccttcgggaagcgtggcgctttctcatagctcacgctgtaggtatctcagttcggtgtaggtcgttcgctccaagctgggctgtgtgcacgaaccccccgttcagcccgaccgctgcgccttatccggtaactatcgtcttgagtccaacccggtaagacacgacttatcgccactggcagcagccactggtaacaggattagcagagcgaggtatgtaggcggtgctacagagttcttgaagtggtggcctaactacggctacactagaagaacagtatttggtatctgcgctctgctgaagccagttaccttcggaaaaagagttggtagctcttgatccggcaaacaaaccaccgctggtagcggtttttttgtttgcaagcagcagattacgcgcagaaaaaaaggatctcaagaagatcctttgatcttttctacggggtctgacgctcagtggaacgaaaactcacgttaagggattttggtcatgagattatcaaaaaggatcttcacctagatccttttaaattaaaaatgaagttttaaatcaatctaaagtatatatgagtaaacttggtctgacagttaccaatgcttaatcagtgaggcacctatctcagcgatctgtctatttcgttcatccatagttgcctgactccccgtcgtgtagataactacgatacgggagggcttaccatctggccccagtgctgcaatgataccgcgagacccacgctcaccggctccagatttatcagcaataaaccagccagccggaagggccgagcgcagaagtggtcctgcaactttatccgcctccatccagtctattaattgttgccgggaagctagagtaagtagttcgccagttaatagtttgcgcaacgttgttgccattgctacaggcatcgtggtgtcacgctcgtcgtttggtatggcttcattcagctccggttcccaacgatcaaggcgagttacatgatcccccatgttgtgcaaaaaagcggttagctccttcggtcctccgatcgttgtcagaagtaagttggccgcagtgttatcactcatggttatggcagcactgcataattctcttactgtcatgccatccgtaagatgcttttctgtgactggtgagtactcaaccaagtcattctgagaatagtgtatgcggcgaccgagttgctcttgcccggcgtcaatacgggataataccgcgccacatagcagaactttaaaagtgctcatcattggaaaacgttcttcggggcgaaaactctcaaggatcttaccgctgttgagatccagttcgatgtaacccactcgtgcacccaactgatcttcagcatcttttactttcaccagcgtttctgggtgagcaaaaacaggaaggcaaaatgccgcaaaaaagggaataagggcgacacggaaatgttgaatactcatactcttcctttttcaatattattgaagcatttatcagggttattgtctcatgagcggatacatatttgaatgtatttagaaaaataaacaaataggggttccgcgcacatttccccgaaaagtgccacctgagggcctatttcccatgattccttcatatttgcatatacgatacaaggctgttagagagataattagaattaatttgactgtaaacacaaagatattagtacaaaatacgtgacgtagaaagtaataatttcttgggtagtttgcagttttaaaattatgttttaaaatggactatcatatgcttaccgtaacttgaaagtatttcgatttcttggctttatatatcttgtggaaaggacgtccacggactgctgggttgtaccaaccctaactgtttgcagcaagcctggacatcgggaatgcgctactggaatcgagatatgctgtcaacctgcaacatgctattgattgtgagatcaatgttggatggacacggtagaccagaagtgttcagcaggagtgttccagccgtagcgtagaacgtagattggttagattaggttttccgagccggttgtcgcgcggttcaatccctggtgcgggtgctagtgccaatacccaccggctccgcactacagtcttctctgaagaccatttttt

SEQ ID NO: 3946 - RNA, 3284 nt, Homo sapiens
  source 1..3284: mol_type = other RNA
aattctgtggaatgtgtgtcagttagggtgtggaaagtccccaggctccccagcaggcagaagtatgcaaagcatgcatctcaattagtcagcaaccaggtgtggaaagtccccaggctccccagcaggcagaagtatgcaaagcatgcatctcaattagtcagcaaccatagtcccgcccctaactccgcccatcccgcccctaactccgcccagttccgcccattctccgccccatggctgactaattttttttatttatgcagaggccgaggccgcctctgcctctgagctattccagaagtagtgaggaggcttttttggaggcctaggcttttgcaaaaagctaacttgtttattgcagcttataatggttacaaataaagcaatagcatcacaaatttcacaaataaagcatttttttcactgcattctagttgtggtttgtccaaactcatcaatgtatcttatcatgtctgtataccgtcgacctctagctagagcttggcgtaatcatggtcatagctgtttcctgtgtgaaattgttatccgctcacaattccacacaacatacgagccggaagcataaagtgtaaagcctggggtgcctaatgagtgagctaactcacattaattgcgttgcgctcactgcccgctttccagtcgggaaacctgtcgtgccagctgcattaatgaatcggccaacgcgcggggagaggcggtttgcgtattgggcgctcttccgcttcctcgctcactgactcgctgcgctcggtcgttcggctgcggcgagcggtatcagctcactcaaaggcggtaatacggttatccacagaatcaggggataacgcaggaaagaacatgtgagcaaaaggccagcaaaaggccaggaaccgtaaaaaggccgcgttgctggcgtttttccataggctccgcccccctgacgagcatcacaaaaatcgacgctcaagtcagaggtggcgaaacccgacaggactataaagataccaggcgtttccccctggaagctccctcgtgcgctctcctgttccgaccctgccgcttaccggatacctgtccgcctttctcccttcgggaagcgtggcgctttctcatagctcacgctgtaggtatctcagttcggtgtaggtcgttcgctccaagctgggctgtgtgcacgaaccccccgttcagcccgaccgctgcgccttatccggtaactatcgtcttgagtccaacccggtaagacacgacttatcgccactggcagcagccactggtaacaggattagcagagcgaggtatgtaggcggtgctacagagttcttgaagtggtggcctaactacggctacactagaagaacagtatttggtatctgcgctctgctgaagccagttaccttcggaaaaagagttggtagctcttgatccggcaaacaaaccaccgctggtagcggtttttttgtttgcaagcagcagattacgcgcagaaaaaaaggatctcaagaagatcctttgatcttttctacggggtctgacgctcagtggaacgaaaactcacgttaagggattttggtcatgagattatcaaaaaggatcttcacctagatccttttaaattaaaaatgaagttttaaatcaatctaaagtatatatgagtaaacttggtctgacagttaccaatgcttaatcagtgaggcacctatctcagcgatctgtctatttcgttcatccatagttgcctgactccccgtcgtgtagataactacgatacgggagggcttaccatctggccccagtgctgcaatgataccgcgagacccacgctcaccggctccagatttatcagcaataaaccagccagccggaagggccgagcgcagaagtggtcctgcaactttatccgcctccatccagtctattaattgttgccgggaagctagagtaagtagttcgccagttaatagtttgcgcaacgttgttgccattgctacaggcatcgtggtgtcacgctcgtcgtttggtatggcttcattcagctccggttcccaacgatcaaggcgagttacatgatcccccatgttgtgcaaaaaagcggttagctccttcggtcctccgatcgttgtcagaagtaagttggccgcagtgttatcactcatggttatggcagcactgcataattctcttactgtcatgccatccgtaagatgcttttctgtgactggtgagtactcaaccaagtcattctgagaatagtgtatgcggcgaccgagttgctcttgcccggcgtcaatacgggataataccgcgccacatagcagaactttaaaagtgctcatcattggaaaacgttcttcggggcgaaaactctcaaggatcttaccgctgttgagatccagttcgatgtaacccactcgtgcacccaactgatcttcagcatcttttactttcaccagcgtttctgggtgagcaaaaacaggaaggcaaaatgccgcaaaaaagggaataagggcgacacggaaatgttgaatactcatactcttcctttttcaatattattgaagcatttatcagggttattgtctcatgagcggatacatatttgaatgtatttagaaaaataaacaaataggggttccgcgcacatttccccgaaaagtgccacctgagggcctatttcccatgattccttcatatttgcatatacgatacaaggctgttagagagataattagaattaatttgactgtaaacacaaagatattagtacaaaatacgtgacgtagaaagtaataatttcttgggtagtttgcagttttaaaattatgttttaaaatggactatcatatgcttaccgtaacttgaaagtatttcgatttcttggctttatatatcttgtggaaaggacgagtttgtggagaaaaaattcaaaacacgacctcattcaagaccttggcgccgtcgtgaaggcaagattgaaaaagtccacggactgctgggttgtaccaaccctaactgtttgcagcaagcctggacatcgggaatgcgctactggaatcgagatatgctgtcaacctgcaacatgctattgattgtgagatcaatgttggatggacacggtagaccagaagtgttcagcaggagtgttccagccgtagcgtagaacgtagattggttagattaggttttccgagccggttgtcgcgcggttcaatccctggtgcgggtgctagtgccaatacccaccggctccgcactacagtcttctctgaagaccatttttt

SEQ ID NO: 3947 - RNA, 3359 nt, Homo sapiens
  source 1..3359: mol_type = other RNA
aattctgtggaatgtgtgtcagttagggtgtggaaagtccccaggctccccagcaggcagaagtatgcaaagcatgcatctcaattagtcagcaaccaggtgtggaaagtccccaggctccccagcaggcagaagtatgcaaagcatgcatctcaattagtcagcaaccatagtcccgcccctaactccgcccatcccgcccctaactccgcccagttccgcccattctccgccccatggctgactaattttttttatttatgcagaggccgaggccgcctctgcctctgagctattccagaagtagtgaggaggcttttttggaggcctaggcttttgcaaaaagctaacttgtttattgcagcttataatggttacaaataaagcaatagcatcacaaatttcacaaataaagcatttttttcactgcattctagttgtggtttgtccaaactcatcaatgtatcttatcatgtctgtataccgtcgacctctagctagagcttggcgtaatcatggtcatagctgtttcctgtgtgaaattgttatccgctcacaattccacacaacatacgagccggaagcataaagtgtaaagcctggggtgcctaatgagtgagctaactcacattaattgcgttgcgctcactgcccgctttccagtcgggaaacctgtcgtgccagctgcattaatgaatcggccaacgcgcggggagaggcggtttgcgtattgggcgctcttccgcttcctcgctcactgactcgctgcgctcggtcgttcggctgcggcgagcggtatcagctcactcaaaggcggtaatacggttatccacagaatcaggggataacgcaggaaagaacatgtgagcaaaaggccagcaaaaggccaggaaccgtaaaaaggccgcgttgctggcgtttttccataggctccgcccccctgacgagcatcacaaaaatcgacgctcaagtcagaggtggcgaaacccgacaggactataaagataccaggcgtttccccctggaagctccctcgtgcgctctcctgttccgaccctgccgcttaccggatacctgtccgcctttctcccttcgggaagcgtggcgctttctcatagctcacgctgtaggtatctcagttcggtgtaggtcgttcgctccaagctgggctgtgtgcacgaaccccccgttcagcccgaccgctgcgccttatccggtaactatcgtcttgagtccaacccggtaagacacgacttatcgccactggcagcagccactggtaacaggattagcagagcgaggtatgtaggcggtgctacagagttcttgaagtggtggcctaactacggctacactagaagaacagtatttggtatctgcgctctgctgaagccagttaccttcggaaaaagagttggtagctcttgatccggcaaacaaaccaccgctggtagcggtttttttgtttgcaagcagcagattacgcgcagaaaaaaaggatctcaagaagatcctttgatcttttctacggggtctgacgctcagtggaacgaaaactcacgttaagggattttggtcatgagattatcaaaaaggatcttcacctagatccttttaaattaaaaatgaagttttaaatcaatctaaagtatatatgagtaaacttggtctgacagttaccaatgcttaatcagtgaggcacctatctcagcgatctgtctatttcgttcatccatagttgcctgactccccgtcgtgtagataactacgatacgggagggcttaccatctggccccagtgctgcaatgataccgcgagacccacgctcaccggctccagatttatcagcaataaaccagccagccggaagggccgagcgcagaagtggtcctgcaactttatccgcctccatccagtctattaattgttgccgggaagctagagtaagtagttcgccagttaatagtttgcgcaacgttgttgccattgctacaggcatcgtggtgtcacgctcgtcgtttggtatggcttcattcagctccggttcccaacgatcaaggcgagttacatgatcccccatgttgtgcaaaaaagcggttagctccttcggtcctccgatcgttgtcagaagtaagttggccgcagtgttatcactcatggttatggcagcactgcataattctcttactgtcatgccatccgtaagatgcttttctgtgactggtgagtactcaaccaagtcattctgagaatagtgtatgcggcgaccgagttgctcttgcccggcgtcaatacgggataataccgcgccacatagcagaactttaaaagtgctcatcattggaaaacgttcttcggggcgaaaactctcaaggatcttaccgctgttgagatccagttcgatgtaacccactcgtgcacccaactgatcttcagcatcttttactttcaccagcgtttctgggtgagcaaaaacaggaaggcaaaatgccgcaaaaaagggaataagggcgacacggaaatgttgaatactcatactcttcctttttcaatattattgaagcatttatcagggttattgtctcatgagcggatacatatttgaatgtatttagaaaaataaacaaataggggttccgcgcacatttccccgaaaagtgccacctgagggcctatttcccatgattccttcatatttgcatatacgatacaaggctgttagagagataattagaattaatttgactgtaaacacaaagatattagtacaaaatacgtgacgtagaaagtaataatttcttgggtagtttgcagttttaaaattatgttttaaaatggactatcatatgcttaccgtaacttgaaagtatttcgatttcttggctttatatatcttgtggaaaggacaagcgcaaccgcattgattgtttccttctcgacgagtacaagacctcatctgtttgccctcgctgttcctcatctgagtttgtggagaaaaaattcaaaacacgacctcattcaagaccttggcgccgtcgtgaaggcaagattgaaaaagtccacggactgctgggttgtaccaaccctaactgtttgcagcaagcctggacatcgggaatgcgctactggaatcgagatatgctgtcaacctgcaacatgctattgattgtgagatcaatgttggatggacacggtagaccagaagtgttcagcaggagtgttccagccgtagcgtagaacgtagattggttagattaggttttccgagccggttgtcgcgcggttcaatccctggtgcgggtgctagtgccaatacccaccggctccgcactacagtcttctctgaagaccatttttt

SEQ ID NO: 3948 - RNA, 3434 nt, Homo sapiens
  source 1..3434: mol_type = other RNA
aattctgtggaatgtgtgtcagttagggtgtggaaagtccccaggctccccagcaggcagaagtatgcaaagcatgcatctcaattagtcagcaaccaggtgtggaaagtccccaggctccccagcaggcagaagtatgcaaagcatgcatctcaattagtcagcaaccatagtcccgcccctaactccgcccatcccgcccctaactccgcccagttccgcccattctccgccccatggctgactaattttttttatttatgcagaggccgaggccgcctctgcctctgagctattccagaagtagtgaggaggcttttttggaggcctaggcttttgcaaaaagctaacttgtttattgcagcttataatggttacaaataaagcaatagcatcacaaatttcacaaataaagcatttttttcactgcattctagttgtggtttgtccaaactcatcaatgtatcttatcatgtctgtataccgtcgacctctagctagagcttggcgtaatcatggtcatagctgtttcctgtgtgaaattgttatccgctcacaattccacacaacatacgagccggaagcataaagtgtaaagcctggggtgcctaatgagtgagctaactcacattaattgcgttgcgctcactgcccgctttccagtcgggaaacctgtcgtgccagctgcattaatgaatcggccaacgcgcggggagaggcggtttgcgtattgggcgctcttccgcttcctcgctcactgactcgctgcgctcggtcgttcggctgcggcgagcggtatcagctcactcaaaggcggtaatacggttatccacagaatcaggggataacgcaggaaagaacatgtgagcaaaaggccagcaaaaggccaggaaccgtaaaaaggccgcgttgctggcgtttttccataggctccgcccccctgacgagcatcacaaaaatcgacgctcaagtcagaggtggcgaaacccgacaggactataaagataccaggcgtttccccctggaagctccctcgtgcgctctcctgttccgaccctgccgcttaccggatacctgtccgcctttctcccttcgggaagcgtggcgctttctcatagctcacgctgtaggtatctcagttcggtgtaggtcgttcgctccaagctgggctgtgtgcacgaaccccccgttcagcccgaccgctgcgccttatccggtaactatcgtcttgagtccaacccggtaagacacgacttatcgccactggcagcagccactggtaacaggattagcagagcgaggtatgtaggcggtgctacagagttcttgaagtggtggcctaactacggctacactagaagaacagtatttggtatctgcgctctgctgaagccagttaccttcggaaaaagagttggtagctcttgatccggcaaacaaaccaccgctggtagcggtttttttgtttgcaagcagcagattacgcgcagaaaaaaaggatctcaagaagatcctttgatcttttctacggggtctgacgctcagtggaacgaaaactcacgttaagggattttggtcatgagattatcaaaaaggatcttcacctagatccttttaaattaaaaatgaagttttaaatcaatctaaagtatatatgagtaaacttggtctgacagttaccaatgcttaatcagtgaggcacctatctcagcgatctgtctatttcgttcatccatagttgcctgactccccgtcgtgtagataactacgatacgggagggcttaccatctggccccagtgctgcaatgataccgcgagacccacgctcaccggctccagatttatcagcaataaaccagccagccggaagggccgagcgcagaagtggtcctgcaactttatccgcctccatccagtctattaattgttgccgggaagctagagtaagtagttcgccagttaatagtttgcgcaacgttgttgccattgctacaggcatcgtggtgtcacgctcgtcgtttggtatggcttcattcagctccggttcccaacgatcaaggcgagttacatgatcccccatgttgtgcaaaaaagcggttagctccttcggtcctccgatcgttgtcagaagtaagttggccgcagtgttatcactcatggttatggcagcactgcataattctcttactgtcatgccatccgtaagatgcttttctgtgactggtgagtactcaaccaagtcattctgagaatagtgtatgcggcgaccgagttgctcttgcccggcgtcaatacgggataataccgcgccacatagcagaactttaaaagtgctcatcattggaaaacgttcttcggggcgaaaactctcaaggatcttaccgctgttgagatccagttcgatgtaacccactcgtgcacccaactgatcttcagcatcttttactttcaccagcgtttctgggtgagcaaaaacaggaaggcaaaatgccgcaaaaaagggaataagggcgacacggaaatgttgaatactcatactcttcctttttcaatattattgaagcatttatcagggttattgtctcatgagcggatacatatttgaatgtatttagaaaaataaacaaataggggttccgcgcacatttccccgaaaagtgccacctgagggcctatttcccatgattccttcatatttgcatatacgatacaaggctgttagagagataattagaattaatttgactgtaaacacaaagatattagtacaaaatacgtgacgtagaaagtaataatttcttgggtagtttgcagttttaaaattatgttttaaaatggactatcatatgcttaccgtaacttgaaagtatttcgatttcttggctttatatatcttgtggaaaggacggtgattggagcgacgctggtcgaactgcgagatttcagacctcatcaaagacaaaaggctggcgcaccctctttaagcgcaaccgcattgattgtttccttctcgacgagtacaagacctcatctgtttgccctcgctgttcctcatctgagtttgtggagaaaaaattcaaaacacgacctcattcaagaccttggcgccgtcgtgaaggcaagattgaaaaagtccacggactgctgggttgtaccaaccctaactgtttgcagcaagcctggacatcgggaatgcgctactggaatcgagatatgctgtcaacctgcaacatgctattgattgtgagatcaatgttggatggacacggtagaccagaagtgttcagcaggagtgttccagccgtagcgtagaacgtagattggttagattaggttttccgagccggttgtcgcgcggttcaatccctggtgcgggtgctagtgccaatacccaccggctccgcactacagtcttctctgaagaccatttttt

SEQ ID NO: 3949 - RNA, 3037 nt, Homo sapiens
  source 1..3037: mol_type = other RNA
aattctgtggaatgtgtgtcagttagggtgtggaaagtccccaggctccccagcaggcagaagtatgcaaagcatgcatctcaattagtcagcaaccaggtgtggaaagtccccaggctccccagcaggcagaagtatgcaaagcatgcatctcaattagtcagcaaccatagtcccgcccctaactccgcccatcccgcccctaactccgcccagttccgcccattctccgccccatggctgactaattttttttatttatgcagaggccgaggccgcctctgcctctgagctattccagaagtagtgaggaggcttttttggaggcctaggcttttgcaaaaagctaacttgtttattgcagcttataatggttacaaataaagcaatagcatcacaaatttcacaaataaagcatttttttcactgcattctagttgtggtttgtccaaactcatcaatgtatcttatcatgtctgtataccgtcgacctctagctagagcttggcgtaatcatggtcatagctgtttcctgtgtgaaattgttatccgctcacaattccacacaacatacgagccggaagcataaagtgtaaagcctggggtgcctaatgagtgagctaactcacattaattgcgttgcgctcactgcccgctttccagtcgggaaacctgtcgtgccagctgcattaatgaatcggccaacgcgcggggagaggcggtttgcgtattgggcgctcttccgcttcctcgctcactgactcgctgcgctcggtcgttcggctgcggcgagcggtatcagctcactcaaaggcggtaatacggttatccacagaatcaggggataacgcaggaaagaacatgtgagcaaaaggccagcaaaaggccaggaaccgtaaaaaggccgcgttgctggcgtttttccataggctccgcccccctgacgagcatcacaaaaatcgacgctcaagtcagaggtggcgaaacccgacaggactataaagataccaggcgtttccccctggaagctccctcgtgcgctctcctgttccgaccctgccgcttaccggatacctgtccgcctttctcccttcgggaagcgtggcgctttctcatagctcacgctgtaggtatctcagttcggtgtaggtcgttcgctccaagctgggctgtgtgcacgaaccccccgttcagcccgaccgctgcgccttatccggtaactatcgtcttgagtccaacccggtaagacacgacttatcgccactggcagcagccactggtaacaggattagcagagcgaggtatgtaggcggtgctacagagttcttgaagtggtggcctaactacggctacactagaagaacagtatttggtatctgcgctctgctgaagccagttaccttcggaaaaagagttggtagctcttgatccggcaaacaaaccaccgctggtagcggtttttttgtttgcaagcagcagattacgcgcagaaaaaaaggatctcaagaagatcctttgatcttttctacggggtctgacgctcagtggaacgaaaactcacgttaagggattttggtcatgagattatcaaaaaggatcttcacctagatccttttaaattaaaaatgaagttttaaatcaatctaaagtatatatgagtaaacttggtctgacagttaccaatgcttaatcagtgaggcacctatctcagcgatctgtctatttcgttcatccatagttgcctgactccccgtcgtgtagataactacgatacgggagggcttaccatctggccccagtgctgcaatgataccgcgagacccacgctcaccggctccagatttatcagcaataaaccagccagccggaagggccgagcgcagaagtggtcctgcaactttatccgcctccatccagtctattaattgttgccgggaagctagagtaagtagttcgccagttaatagtttgcgcaacgttgttgccattgctacaggcatcgtggtgtcacgctcgtcgtttggtatggcttcattcagctccggttcccaacgatcaaggcgagttacatgatcccccatgttgtgcaaaaaagcggttagctccttcggtcctccgatcgttgtcagaagtaagttggccgcagtgttatcactcatggttatggcagcactgcataattctcttactgtcatgccatccgtaagatgcttttctgtgactggtgagtactcaaccaagtcattctgagaatagtgtatgcggcgaccgagttgctcttgcccggcgtcaatacgggataataccgcgccacatagcagaactttaaaagtgctcatcattggaaaacgttcttcggggcgaaaactctcaaggatcttaccgctgttgagatccagttcgatgtaacccactcgtgcacccaactgatcttcagcatcttttactttcaccagcgtttctgggtgagcaaaaacaggaaggcaaaatgccgcaaaaaagggaataagggcgacacggaaatgttgaatactcatactcttcctttttcaatattattgaagcatttatcagggttattgtctcatgagcggatacatatttgaatgtatttagaaaaataaacaaataggggttccgcgcacatttccccgaaaagtgccacctgagggcctatttcccatgattccttcatatttgcatatacgatacaaggctgttagagagataattagaattaatttgactgtaaacacaaagatattagtacaaaatacgtgacgtagaaagtaataatttcttgggtagtttgcagttttaaaattatgttttaaaatggactatcatatgcttaccgtaacttgaaagtatttcgatttcttggctttatatatcttgtggaaaggacagaaaacatgaggatcacccatgtctgcagttttccgagccggttgtcgcgcggttcaatccctggtgcgggtgctagtgccaatacccaccggctccgcactacagtcttctctgaagaccatttttt

SEQ ID NO: 3950 - RNA, 3033 nt, Homo sapiens
  source 1..3033: mol_type = other RNA
aattctgtggaatgtgtgtcagttagggtgtggaaagtccccaggctccccagcaggcagaagtatgcaaagcatgcatctcaattagtcagcaaccaggtgtggaaagtccccaggctccccagcaggcagaagtatgcaaagcatgcatctcaattagtcagcaaccatagtcccgcccctaactccgcccatcccgcccctaactccgcccagttccgcccattctccgccccatggctgactaattttttttatttatgcagaggccgaggccgcctctgcctctgagctattccagaagtagtgaggaggcttttttggaggcctaggcttttgcaaaaagctaacttgtttattgcagcttataatggttacaaataaagcaatagcatcacaaatttcacaaataaagcatttttttcactgcattctagttgtggtttgtccaaactcatcaatgtatcttatcatgtctgtataccgtcgacctctagctagagcttggcgtaatcatggtcatagctgtttcctgtgtgaaattgttatccgctcacaattccacacaacatacgagccggaagcataaagtgtaaagcctggggtgcctaatgagtgagctaactcacattaattgcgttgcgctcactgcccgctttccagtcgggaaacctgtcgtgccagctgcattaatgaatcggccaacgcgcggggagaggcggtttgcgtattgggcgctcttccgcttcctcgctcactgactcgctgcgctcggtcgttcggctgcggcgagcggtatcagctcactcaaaggcggtaatacggttatccacagaatcaggggataacgcaggaaagaacatgtgagcaaaaggccagcaaaaggccaggaaccgtaaaaaggccgcgttgctggcgtttttccataggctccgcccccctgacgagcatcacaaaaatcgacgctcaagtcagaggtggcgaaacccgacaggactataaagataccaggcgtttccccctggaagctccctcgtgcgctctcctgttccgaccctgccgcttaccggatacctgtccgcctttctcccttcgggaagcgtggcgctttctcatagctcacgctgtaggtatctcagttcggtgtaggtcgttcgctccaagctgggctgtgtgcacgaaccccccgttcagcccgaccgctgcgccttatccggtaactatcgtcttgagtccaacccggtaagacacgacttatcgccactggcagcagccactggtaacaggattagcagagcgaggtatgtaggcggtgctacagagttcttgaagtggtggcctaactacggctacactagaagaacagtatttggtatctgcgctctgctgaagccagttaccttcggaaaaagagttggtagctcttgatccggcaaacaaaccaccgctggtagcggtttttttgtttgcaagcagcagattacgcgcagaaaaaaaggatctcaagaagatcctttgatcttttctacggggtctgacgctcagtggaacgaaaactcacgttaagggattttggtcatgagattatcaaaaaggatcttcacctagatccttttaaattaaaaatgaagttttaaatcaatctaaagtatatatgagtaaacttggtctgacagttaccaatgcttaatcagtgaggcacctatctcagcgatctgtctatttcgttcatccatagttgcctgactccccgtcgtgtagataactacgatacgggagggcttaccatctggccccagtgctgcaatgataccgcgagacccacgctcaccggctccagatttatcagcaataaaccagccagccggaagggccgagcgcagaagtggtcctgcaactttatccgcctccatccagtctattaattgttgccgggaagctagagtaagtagttcgccagttaatagtttgcgcaacgttgttgccattgctacaggcatcgtggtgtcacgctcgtcgtttggtatggcttcattcagctccggttcccaacgatcaaggcgagttacatgatcccccatgttgtgcaaaaaagcggttagctccttcggtcctccgatcgttgtcagaagtaagttggccgcagtgttatcactcatggttatggcagcactgcataattctcttactgtcatgccatccgtaagatgcttttctgtgactggtgagtactcaaccaagtcattctgagaatagtgtatgcggcgaccgagttgctcttgcccggcgtcaatacgggataataccgcgccacatagcagaactttaaaagtgctcatcattggaaaacgttcttcggggcgaaaactctcaaggatcttaccgctgttgagatccagttcgatgtaacccactcgtgcacccaactgatcttcagcatcttttactttcaccagcgtttctgggtgagcaaaaacaggaaggcaaaatgccgcaaaaaagggaataagggcgacacggaaatgttgaatactcatactcttcctttttcaatattattgaagcatttatcagggttattgtctcatgagcggatacatatttgaatgtatttagaaaaataaacaaataggggttccgcgcacatttccccgaaaagtgccacctgagggcctatttcccatgattccttcatatttgcatatacgatacaaggctgttagagagataattagaattaatttgactgtaaacacaaagatattagtacaaaatacgtgacgtagaaagtaataatttcttgggtagtttgcagttttaaaattatgttttaaaatggactatcatatgcttaccgtaacttgaaagtatttcgatttcttggctttatatatcttgtggaaaggacgttcactgccgtataggcagctaaggttttccgagccggttgtcgcgcggttcaatccctggtgcgggtgctagtgccaatacccaccggctccgcactacagtcttctctgaagaccatttttt

SEQ ID NO: 3951 - RNA, 3076 nt, Homo sapiens
  source 1..3076: mol_type = other RNA
aattctgtggaatgtgtgtcagttagggtgtggaaagtccccaggctccccagcaggcagaagtatgcaaagcatgcatctcaattagtcagcaaccaggtgtggaaagtccccaggctccccagcaggcagaagtatgcaaagcatgcatctcaattagtcagcaaccatagtcccgcccctaactccgcccatcccgcccctaactccgcccagttccgcccattctccgccccatggctgactaattttttttatttatgcagaggccgaggccgcctctgcctctgagctattccagaagtagtgaggaggcttttttggaggcctaggcttttgcaaaaagctaacttgtttattgcagcttataatggttacaaataaagcaatagcatcacaaatttcacaaataaagcatttttttcactgcattctagttgtggtttgtccaaactcatcaatgtatcttatcatgtctgtataccgtcgacctctagctagagcttggcgtaatcatggtcatagctgtttcctgtgtgaaattgttatccgctcacaattccacacaacatacgagccggaagcataaagtgtaaagcctggggtgcctaatgagtgagctaactcacattaattgcgttgcgctcactgcccgctttccagtcgggaaacctgtcgtgccagctgcattaatgaatcggccaacgcgcggggagaggcggtttgcgtattgggcgctcttccgcttcctcgctcactgactcgctgcgctcggtcgttcggctgcggcgagcggtatcagctcactcaaaggcggtaatacggttatccacagaatcaggggataacgcaggaaagaacatgtgagcaaaaggccagcaaaaggccaggaaccgtaaaaaggccgcgttgctggcgtttttccataggctccgcccccctgacgagcatcacaaaaatcgacgctcaagtcagaggtggcgaaacccgacaggactataaagataccaggcgtttccccctggaagctccctcgtgcgctctcctgttccgaccctgccgcttaccggatacctgtccgcctttctcccttcgggaagcgtggcgctttctcatagctcacgctgtaggtatctcagttcggtgtaggtcgttcgctccaagctgggctgtgtgcacgaaccccccgttcagcccgaccgctgcgccttatccggtaactatcgtcttgagtccaacccggtaagacacgacttatcgccactggcagcagccactggtaacaggattagcagagcgaggtatgtaggcggtgctacagagttcttgaagtggtggcctaactacggctacactagaagaacagtatttggtatctgcgctctgctgaagccagttaccttcggaaaaagagttggtagctcttgatccggcaaacaaaccaccgctggtagcggtttttttgtttgcaagcagcagattacgcgcagaaaaaaaggatctcaagaagatcctttgatcttttctacggggtctgacgctcagtggaacgaaaactcacgttaagggattttggtcatgagattatcaaaaaggatcttcacctagatccttttaaattaaaaatgaagttttaaatcaatctaaagtatatatgagtaaacttggtctgacagttaccaatgcttaatcagtgaggcacctatctcagcgatctgtctatttcgttcatccatagttgcctgactccccgtcgtgtagataactacgatacgggagggcttaccatctggccccagtgctgcaatgataccgcgagacccacgctcaccggctccagatttatcagcaataaaccagccagccggaagggccgagcgcagaagtggtcctgcaactttatccgcctccatccagtctattaattgttgccgggaagctagagtaagtagttcgccagttaatagtttgcgcaacgttgttgccattgctacaggcatcgtggtgtcacgctcgtcgtttggtatggcttcattcagctccggttcccaacgatcaaggcgagttacatgatcccccatgttgtgcaaaaaagcggttagctccttcggtcctccgatcgttgtcagaagtaagttggccgcagtgttatcactcatggttatggcagcactgcataattctcttactgtcatgccatccgtaagatgcttttctgtgactggtgagtactcaaccaagtcattctgagaatagtgtatgcggcgaccgagttgctcttgcccggcgtcaatacgggataataccgcgccacatagcagaactttaaaagtgctcatcattggaaaacgttcttcggggcgaaaactctcaaggatcttaccgctgttgagatccagttcgatgtaacccactcgtgcacccaactgatcttcagcatcttttactttcaccagcgtttctgggtgagcaaaaacaggaaggcaaaatgccgcaaaaaagggaataagggcgacacggaaatgttgaatactcatactcttcctttttcaatattattgaagcatttatcagggttattgtctcatgagcggatacatatttgaatgtatttagaaaaataaacaaataggggttccgcgcacatttccccgaaaagtgccacctgagggcctatttcccatgattccttcatatttgcatatacgatacaaggctgttagagagataattagaattaatttgactgtaaacacaaagatattagtacaaaatacgtgacgtagaaagtaataatttcttgggtagtttgcagttttaaaattatgttttaaaatggactatcatatgcttaccgtaacttgaaagtatttcgatttcttggctttatatatcttgtggaaaggacgttttccgagccggttgtcgcgcggttcaatccctggtgcgggtgctagtgccaatacccaccggctccgcactacagtcttctctgaagaccaggccggcatggtcccagcctcctcgctggcgccggctgggcaacatgcttcggcatggcgaatgggactttttt

SEQ ID NO: 3952 - RNA, 3008 nt, Homo sapiens
  source 1..3008: mol_type = other RNA
aattctgtggaatgtgtgtcagttagggtgtggaaagtccccaggctccccagcaggcagaagtatgcaaagcatgcatctcaattagtcagcaaccaggtgtggaaagtccccaggctccccagcaggcagaagtatgcaaagcatgcatctcaattagtcagcaaccatagtcccgcccctaactccgcccatcccgcccctaactccgcccagttccgcccattctccgccccatggctgactaattttttttatttatgcagaggccgaggccgcctctgcctctgagctattccagaagtagtgaggaggcttttttggaggcctaggcttttgcaaaaagctaacttgtttattgcagcttataatggttacaaataaagcaatagcatcacaaatttcacaaataaagcatttttttcactgcattctagttgtggtttgtccaaactcatcaatgtatcttatcatgtctgtataccgtcgacctctagctagagcttggcgtaatcatggtcatagctgtttcctgtgtgaaattgttatccgctcacaattccacacaacatacgagccggaagcataaagtgtaaagcctggggtgcctaatgagtgagctaactcacattaattgcgttgcgctcactgcccgctttccagtcgggaaacctgtcgtgccagctgcattaatgaatcggccaacgcgcggggagaggcggtttgcgtattgggcgctcttccgcttcctcgctcactgactcgctgcgctcggtcgttcggctgcggcgagcggtatcagctcactcaaaggcggtaatacggttatccacagaatcaggggataacgcaggaaagaacatgtgagcaaaaggccagcaaaaggccaggaaccgtaaaaaggccgcgttgctggcgtttttccataggctccgcccccctgacgagcatcacaaaaatcgacgctcaagtcagaggtggcgaaacccgacaggactataaagataccaggcgtttccccctggaagctccctcgtgcgctctcctgttccgaccctgccgcttaccggatacctgtccgcctttctcccttcgggaagcgtggcgctttctcatagctcacgctgtaggtatctcagttcggtgtaggtcgttcgctccaagctgggctgtgtgcacgaaccccccgttcagcccgaccgctgcgccttatccggtaactatcgtcttgagtccaacccggtaagacacgacttatcgccactggcagcagccactggtaacaggattagcagagcgaggtatgtaggcggtgctacagagttcttgaagtggtggcctaactacggctacactagaagaacagtatttggtatctgcgctctgctgaagccagttaccttcggaaaaagagttggtagctcttgatccggcaaacaaaccaccgctggtagcggtttttttgtttgcaagcagcagattacgcgcagaaaaaaaggatctcaagaagatcctttgatcttttctacggggtctgacgctcagtggaacgaaaactcacgttaagggattttggtcatgagattatcaaaaaggatcttcacctagatccttttaaattaaaaatgaagttttaaatcaatctaaagtatatatgagtaaacttggtctgacagttaccaatgcttaatcagtgaggcacctatctcagcgatctgtctatttcgttcatccatagttgcctgactccccgtcgtgtagataactacgatacgggagggcttaccatctggccccagtgctgcaatgataccgcgagacccacgctcaccggctccagatttatcagcaataaaccagccagccggaagggccgagcgcagaagtggtcctgcaactttatccgcctccatccagtctattaattgttgccgggaagctagagtaagtagttcgccagttaatagtttgcgcaacgttgttgccattgctacaggcatcgtggtgtcacgctcgtcgtttggtatggcttcattcagctccggttcccaacgatcaaggcgagttacatgatcccccatgttgtgcaaaaaagcggttagctccttcggtcctccgatcgttgtcagaagtaagttggccgcagtgttatcactcatggttatggcagcactgcataattctcttactgtcatgccatccgtaagatgcttttctgtgactggtgagtactcaaccaagtcattctgagaatagtgtatgcggcgaccgagttgctcttgcccggcgtcaatacgggataataccgcgccacatagcagaactttaaaagtgctcatcattggaaaacgttcttcggggcgaaaactctcaaggatcttaccgctgttgagatccagttcgatgtaacccactcgtgcacccaactgatcttcagcatcttttactttcaccagcgtttctgggtgagcaaaaacaggaaggcaaaatgccgcaaaaaagggaataagggcgacacggaaatgttgaatactcatactcttcctttttcaatattattgaagcatttatcagggttattgtctcatgagcggatacatatttgaatgtatttagaaaaataaacaaataggggttccgcgcacatttccccgaaaagtgccacctgagggcctatttcccatgattccttcatatttgcatatacgatacaaggctgttagagagataattagaattaatttgactgtaaacacaaagatattagtacaaaatacgtgacgtagaaagtaataatttcttgggtagtttgcagttttaaaattatgttttaaaatggactatcatatgcttaccgtaacttgaaagtatttcgatttcttggctttatatatcttgtggaaaggaccttttccgaaccagttgtcgctggtttattccctggtgtagtagctagtgccattttctgtcacctctacactagcattccttaacacatcacttttttt

SEQ ID NO: 3953 - RNA, 3008 nt, Homo sapiens
  source 1..3008: mol_type = other RNA
aattctgtggaatgtgtgtcagttagggtgtggaaagtccccaggctccccagcaggcagaagtatgcaaagcatgcatctcaattagtcagcaaccaggtgtggaaagtccccaggctccccagcaggcagaagtatgcaaagcatgcatctcaattagtcagcaaccatagtcccgcccctaactccgcccatcccgcccctaactccgcccagttccgcccattctccgccccatggctgactaattttttttatttatgcagaggccgaggccgcctctgcctctgagctattccagaagtagtgaggaggcttttttggaggcctaggcttttgcaaaaagctaacttgtttattgcagcttataatggttacaaataaagcaatagcatcacaaatttcacaaataaagcatttttttcactgcattctagttgtggtttgtccaaactcatcaatgtatcttatcatgtctgtataccgtcgacctctagctagagcttggcgtaatcatggtcatagctgtttcctgtgtgaaattgttatccgctcacaattccacacaacatacgagccggaagcataaagtgtaaagcctggggtgcctaatgagtgagctaactcacattaattgcgttgcgctcactgcccgctttccagtcgggaaacctgtcgtgccagctgcattaatgaatcggccaacgcgcggggagaggcggtttgcgtattgggcgctcttccgcttcctcgctcactgactcgctgcgctcggtcgttcggctgcggcgagcggtatcagctcactcaaaggcggtaatacggttatccacagaatcaggggataacgcaggaaagaacatgtgagcaaaaggccagcaaaaggccaggaaccgtaaaaaggccgcgttgctggcgtttttccataggctccgcccccctgacgagcatcacaaaaatcgacgctcaagtcagaggtggcgaaacccgacaggactataaagataccaggcgtttccccctggaagctccctcgtgcgctctcctgttccgaccctgccgcttaccggatacctgtccgcctttctcccttcgggaagcgtggcgctttctcatagctcacgctgtaggtatctcagttcggtgtaggtcgttcgctccaagctgggctgtgtgcacgaaccccccgttcagcccgaccgctgcgccttatccggtaactatcgtcttgagtccaacccggtaagacacgacttatcgccactggcagcagccactggtaacaggattagcagagcgaggtatgtaggcggtgctacagagttcttgaagtggtggcctaactacggctacactagaagaacagtatttggtatctgcgctctgctgaagccagttaccttcggaaaaagagttggtagctcttgatccggcaaacaaaccaccgctggtagcggtttttttgtttgcaagcagcagattacgcgcagaaaaaaaggatctcaagaagatcctttgatcttttctacggggtctgacgctcagtggaacgaaaactcacgttaagggattttggtcatgagattatcaaaaaggatcttcacctagatccttttaaattaaaaatgaagttttaaatcaatctaaagtatatatgagtaaacttggtctgacagttaccaatgcttaatcagtgaggcacctatctcagcgatctgtctatttcgttcatccatagttgcctgactccccgtcgtgtagataactacgatacgggagggcttaccatctggccccagtgctgcaatgataccgcgagacccacgctcaccggctccagatttatcagcaataaaccagccagccggaagggccgagcgcagaagtggtcctgcaactttatccgcctccatccagtctattaattgttgccgggaagctagagtaagtagttcgccagttaatagtttgcgcaacgttgttgccattgctacaggcatcgtggtgtcacgctcgtcgtttggtatggcttcattcagctccggttcccaacgatcaaggcgagttacatgatcccccatgttgtgcaaaaaagcggttagctccttcggtcctccgatcgttgtcagaagtaagttggccgcagtgttatcactcatggttatggcagcactgcataattctcttactgtcatgccatccgtaagatgcttttctgtgactggtgagtactcaaccaagtcattctgagaatagtgtatgcggcgaccgagttgctcttgcccggcgtcaatacgggataataccgcgccacatagcagaactttaaaagtgctcatcattggaaaacgttcttcggggcgaaaactctcaaggatcttaccgctgttgagatccagttcgatgtaacccactcgtgcacccaactgatcttcagcatcttttactttcaccagcgtttctgggtgagcaaaaacaggaaggcaaaatgccgcaaaaaagggaataagggcgacacggaaatgttgaatactcatactcttcctttttcaatattattgaagcatttatcagggttattgtctcatgagcggatacatatttgaatgtatttagaaaaataaacaaataggggttccgcgcacatttccccgaaaagtgccacctgagggcctatttcccatgattccttcatatttgcatatacgatacaaggctgttagagagataattagaattaatttgactgtaaacacaaagatattagtacaaaatacgtgacgtagaaagtaataatttcttgggtagtttgcagttttaaaattatgttttaaaatggactatcatatgcttaccgtaacttgaaagtatttcgatttcttggctttatatatcttgtggaaaggaccttttccgaaccagttgtcgctggtttattccctggtgtagtagctagtgccaatttctgtcacctctacactagcattccttaacacatcacttttttt

SEQ ID NO: 3954 - RNA, 3009 nt, Homo sapiens
  source 1..3009: mol_type = other RNA
aattctgtggaatgtgtgtcagttagggtgtggaaagtccccaggctccccagcaggcagaagtatgcaaagcatgcatctcaattagtcagcaaccaggtgtggaaagtccccaggctccccagcaggcagaagtatgcaaagcatgcatctcaattagtcagcaaccatagtcccgcccctaactccgcccatcccgcccctaactccgcccagttccgcccattctccgccccatggctgactaattttttttatttatgcagaggccgaggccgcctctgcctctgagctattccagaagtagtgaggaggcttttttggaggcctaggcttttgcaaaaagctaacttgtttattgcagcttataatggttacaaataaagcaatagcatcacaaatttcacaaataaagcatttttttcactgcattctagttgtggtttgtccaaactcatcaatgtatcttatcatgtctgtataccgtcgacctctagctagagcttggcgtaatcatggtcatagctgtttcctgtgtgaaattgttatccgctcacaattccacacaacatacgagccggaagcataaagtgtaaagcctggggtgcctaatgagtgagctaactcacattaattgcgttgcgctcactgcccgctttccagtcgggaaacctgtcgtgccagctgcattaatgaatcggccaacgcgcggggagaggcggtttgcgtattgggcgctcttccgcttcctcgctcactgactcgctgcgctcggtcgttcggctgcggcgagcggtatcagctcactcaaaggcggtaatacggttatccacagaatcaggggataacgcaggaaagaacatgtgagcaaaaggccagcaaaaggccaggaaccgtaaaaaggccgcgttgctggcgtttttccataggctccgcccccctgacgagcatcacaaaaatcgacgctcaagtcagaggtggcgaaacccgacaggactataaagataccaggcgtttccccctggaagctccctcgtgcgctctcctgttccgaccctgccgcttaccggatacctgtccgcctttctcccttcgggaagcgtggcgctttctcatagctcacgctgtaggtatctcagttcggtgtaggtcgttcgctccaagctgggctgtgtgcacgaaccccccgttcagcccgaccgctgcgccttatccggtaactatcgtcttgagtccaacccggtaagacacgacttatcgccactggcagcagccactggtaacaggattagcagagcgaggtatgtaggcggtgctacagagttcttgaagtggtggcctaactacggctacactagaagaacagtatttggtatctgcgctctgctgaagccagttaccttcggaaaaagagttggtagctcttgatccggcaaacaaaccaccgctggtagcggtttttttgtttgcaagcagcagattacgcgcagaaaaaaaggatctcaagaagatcctttgatcttttctacggggtctgacgctcagtggaacgaaaactcacgttaagggattttggtcatgagattatcaaaaaggatcttcacctagatccttttaaattaaaaatgaagttttaaatcaatctaaagtatatatgagtaaacttggtctgacagttaccaatgcttaatcagtgaggcacctatctcagcgatctgtctatttcgttcatccatagttgcctgactccccgtcgtgtagataactacgatacgggagggcttaccatctggccccagtgctgcaatgataccgcgagacccacgctcaccggctccagatttatcagcaataaaccagccagccggaagggccgagcgcagaagtggtcctgcaactttatccgcctccatccagtctattaattgttgccgggaagctagagtaagtagttcgccagttaatagtttgcgcaacgttgttgccattgctacaggcatcgtggtgtcacgctcgtcgtttggtatggcttcattcagctccggttcccaacgatcaaggcgagttacatgatcccccatgttgtgcaaaaaagcggttagctccttcggtcctccgatcgttgtcagaagtaagttggccgcagtgttatcactcatggttatggcagcactgcataattctcttactgtcatgccatccgtaagatgcttttctgtgactggtgagtactcaaccaagtcattctgagaatagtgtatgcggcgaccgagttgctcttgcccggcgtcaatacgggataataccgcgccacatagcagaactttaaaagtgctcatcattggaaaacgttcttcggggcgaaaactctcaaggatcttaccgctgttgagatccagttcgatgtaacccactcgtgcacccaactgatcttcagcatcttttactttcaccagcgtttctgggtgagcaaaaacaggaaggcaaaatgccgcaaaaaagggaataagggcgacacggaaatgttgaatactcatactcttcctttttcaatattattgaagcatttatcagggttattgtctcatgagcggatacatatttgaatgtatttagaaaaataaacaaataggggttccgcgcacatttccccgaaaagtgccacctgagggcctatttcccatgattccttcatatttgcatatacgatacaaggctgttagagagataattagaattaatttgactgtaaacacaaagatattagtacaaaatacgtgacgtagaaagtaataatttcttgggtagtttgcagttttaaaattatgttttaaaatggactatcatatgcttaccgtaacttgaaagtatttcgatttcttggctttatatatcttgtggaaaggacgttttccgaaccggttgtcgcgcggtttattccctggtgtagtagctagtgccagtttctgtcacctctacactagcattccttaacacatcacttttttt

SEQ ID NO: 3955 - RNA, 3008 nt, Homo sapiens
  source 1..3008: mol_type = other RNA
aattctgtggaatgtgtgtcagttagggtgtggaaagtccccaggctccccagcaggcagaagtatgcaaagcatgcatctcaattagtcagcaaccaggtgtggaaagtccccaggctccccagcaggcagaagtatgcaaagcatgcatctcaattagtcagcaaccatagtcccgcccctaactccgcccatcccgcccctaactccgcccagttccgcccattctccgccccatggctgactaattttttttatttatgcagaggccgaggccgcctctgcctctgagctattccagaagtagtgaggaggcttttttggaggcctaggcttttgcaaaaagctaacttgtttattgcagcttataatggttacaaataaagcaatagcatcacaaatttcacaaataaagcatttttttcactgcattctagttgtggtttgtccaaactcatcaatgtatcttatcatgtctgtataccgtcgacctctagctagagcttggcgtaatcatggtcatagctgtttcctgtgtgaaattgttatccgctcacaattccacacaacatacgagccggaagcataaagtgtaaagcctggggtgcctaatgagtgagctaactcacattaattgcgttgcgctcactgcccgctttccagtcgggaaacctgtcgtgccagctgcattaatgaatcggccaacgcgcggggagaggcggtttgcgtattgggcgctcttccgcttcctcgctcactgactcgctgcgctcggtcgttcggctgcggcgagcggtatcagctcactcaaaggcggtaatacggttatccacagaatcaggggataacgcaggaaagaacatgtgagcaaaaggccagcaaaaggccaggaaccgtaaaaaggccgcgttgctggcgtttttccataggctccgcccccctgacgagcatcacaaaaatcgacgctcaagtcagaggtggcgaaacccgacaggactataaagataccaggcgtttccccctggaagctccctcgtgcgctctcctgttccgaccctgccgcttaccggatacctgtccgcctttctcccttcgggaagcgtggcgctttctcatagctcacgctgtaggtatctcagttcggtgtaggtcgttcgctccaagctgggctgtgtgcacgaaccccccgttcagcccgaccgctgcgccttatccggtaactatcgtcttgagtccaacccggtaagacacgacttatcgccactggcagcagccactggtaacaggattagcagagcgaggtatgtaggcggtgctacagagttcttgaagtggtggcctaactacggctacactagaagaacagtatttggtatctgcgctctgctgaagccagttaccttcggaaaaagagttggtagctcttgatccggcaaacaaaccaccgctggtagcggtttttttgtttgcaagcagcagattacgcgcagaaaaaaaggatctcaagaagatcctttgatcttttctacggggtctgacgctcagtggaacgaaaactcacgttaagggattttggtcatgagattatcaaaaaggatcttcacctagatccttttaaattaaaaatgaagttttaaatcaatctaaagtatatatgagtaaacttggtctgacagttaccaatgcttaatcagtgaggcacctatctcagcgatctgtctatttcgttcatccatagttgcctgactccccgtcgtgtagataactacgatacgggagggcttaccatctggccccagtgctgcaatgataccgcgagacccacgctcaccggctccagatttatcagcaataaaccagccagccggaagggccgagcgcagaagtggtcctgcaactttatccgcctccatccagtctattaattgttgccgggaagctagagtaagtagttcgccagttaatagtttgcgcaacgttgttgccattgctacaggcatcgtggtgtcacgctcgtcgtttggtatggcttcattcagctccggttcccaacgatcaaggcgagttacatgatcccccatgttgtgcaaaaaagcggttagctccttcggtcctccgatcgttgtcagaagtaagttggccgcagtgttatcactcatggttatggcagcactgcataattctcttactgtcatgccatccgtaagatgcttttctgtgactggtgagtactcaaccaagtcattctgagaatagtgtatgcggcgaccgagttgctcttgcccggcgtcaatacgggataataccgcgccacatagcagaactttaaaagtgctcatcattggaaaacgttcttcggggcgaaaactctcaaggatcttaccgctgttgagatccagttcgatgtaacccactcgtgcacccaactgatcttcagcatcttttactttcaccagcgtttctgggtgagcaaaaacaggaaggcaaaatgccgcaaaaaagggaataagggcgacacggaaatgttgaatactcatactcttcctttttcaatattattgaagcatttatcagggttattgtctcatgagcggatacatatttgaatgtatttagaaaaataaacaaataggggttccgcgcacatttccccgaaaagtgccacctgagggcctatttcccatgattccttcatatttgcatatacgatacaaggctgttagagagataattagaattaatttgactgtaaacacaaagatattagtacaaaatacgtgacgtagaaagtaataatttcttgggtagtttgcagttttaaaattatgttttaaaatggactatcatatgcttaccgtaacttgaaagtatttcgatttcttggctttatatatcttgtggaaaggaccttttccgaaccggttgtcgccggtttattccctggtgtagtagctagtgccattttctgtcacctctacactagcattccttaacacatcacttttttt

SEQ ID NO: 3956 - RNA, 5729 nt, Homo sapiens
  source 1..5729: mol_type = other RNA
cgttacataacttacggtaaatggcccgcctggctgaccgcccaacgacccccgcccattgacgtcaataatgacgtatgttcccatagtaacgccaatagggactttccattgacgtcaatgggtggagtatttacggtaaactgcccacttggcagtacatcaagtgtatcatatgccaagtacgccccctattgacgtcaatgacggtaaatggcccgcctggcattatgcccagtacatgaccttatgggactttcctacttggcagtacatctacgtattagtcatcgctattaccatggtgatgcggttttggcagtacatcaatgggcgtggatagcggtttgactcacggggatttccaagtctccaccccattgacgtcaatgggagtttgttttggcaccaaaatcaacgggactttccaaaatgtcgtaacaactccgccccattgacgcaaatgggcggtaggcgtgtacggtgggaggtctatataagcagagctggtttagtgaaccgtcagatccgctagcgctaccggactcagatcgccaccatgtacccctacgacgtgccagactacgcccctgcggcaaaaaagaaaaagttggacggcggctctggcggcggaggatctggcggaggtggaagcggaggaccgcctaagaagaagcagaagctggaacggctgaagaaactggacaagcccacactgcacacctgtaacaagaccagcttcgccaaggccttcctgcctaacgagacataccggcagcggctgctggactatatcgccatcattcaccagctggccgaccacgcctctcacgccctgaagttttacatcctgagcacctccaccagcagcttccctgtggtgcacgaggataccatcgaggccatcctgtacctgctgaacaagggcgaagcctggcatcccagaaaagaggccaagaaggcctggcgggattgcctgctgccttacgtgcagagatactgccagatcgtgggcttcattcaccccaacctgagaggcgagcagcagagcatcaactacctgaccgtgtccatgatgaccaacctgaaagtgaacgtgcaagagcacttcatgcagatgctgctgcggtacatcaatctgcgcttcgacgtgaagggccagaagcagagactgcctcctaagagcgacgcccgcaaggcctttttcacccggctgagatacctgaagtccgtgttcctgttcgacgtggtgcccgagctggaattcctggacgatctgacccctctggaaagcgaggtgctggaagagatctggtccctggacctgccttttctgcccaacgatcctctggcctacgccatcgtggccgatcctatgagcttcttcccagcctactgcaagctgagcggcctgtacgagcagtacggcttccagcggtttagcgccattcctctgcggagaagcctgatccagtctcacgtgcggatcgacaccatcatcctgtatcagcacatcctgtgcatcaccagacgggacgccgagacagtggaaaaggacgacctgtggatgagagtgtgcaacctgtgcaccaaagccttccggtccagatgcggcatgcacttcgagggcagcatcacaacagatggcgccagcgtgtccgtgtacctgaaacaccctgaggccgataagtacggcaagagaggcgccagaaagtccgccaatactgtggccgccgaagtgaaggccctgtacgtggaaaacaacctgcctgcctgtagagccgccgagaacgtggtggtcatcgaccccaacaagcgggatatcctgtactgccaggacagcaacggcaccaccttcagatacaccgccaaccagagagccgtggaaaccggcagcagaagattcgccaagcggcgggaagccatgaaggaagaagccggcgttgacctgatcgagagcagaatccctagccacaagaccatgaacctgatggacttcaccagatacctgctcgtgcggagagccgactgggacagacggaaagagttctactctcaccccgctcacacccggtggaagtggcacagcttcatcaaccggcagaagtccgagagcgacctgatcagcaacatgcggaacaaatacggcgagaacttcaccgtggtcatgggcgattggagcgacgctggaagaaccgccagattccagaccagcagcaagaccaaaggctggcggaccctgttcaagcggaaccggatcgattgcttcctgctggacgagtacaagacctccagcgtgtgccctagatgcagcagcagcgagttcgtggaaaagaagttcaagacccggcctcacagcagaccctggcgaagaagagagggcaagatcgagaaggtgcacggcctgctgggctgcaccaatcctaattgtctgcagcaggcctggaccagcggcatgagatactggaaccgggacatgctgagcacatgcaacatgctgctgatcgtgcggtccatgctggatggccatggcagacctgaggtgttctctagatctgtgcctgccgtggcctgactagcataaccccttggggcgcactcctcaggtgcaggctgcctatcagaaggtggtggctggtgtggccaatgccctggctcacaaataccactgagatctttttccctctgccaaaaattatggggacatcatgaagccccttgagcatctgacttctggctaataaaggaaatttattttcattgcaatagtgtgttggaattttttgtgtctctcactcggaaggacatatgggagggcaaatcatttaaaacatcagaatgagtatttggtttagagtttggcaacatatgcccatatgctggctgccatgaacaaaggttggctataaagaggtcatcagtatatgaaacagccccctgctgtccattccttattccatagaaaagccttgacttgaggttagattttttttatattttgttttgtgttatttttttctttaacatccctaaaattttccttacatgttttactagccagatttttcctcctctcctgactactcccagtcatagctgtccctcttctcttatggagatccctcgacctgcagcccaagcttggcgtaatcatggtcatagctgtttcctgtgtgaaattgttatccgctcacaattccacacaacatacgagccggaagcataaagtgtaaagcctggggtgcctaatgagtgagctaactcacattaattgcgttgcgctcactgcccgctttccagtcgggaaacctgtcgtgccagcggatccgcatctcaattagtcagcaaccatagtcccgcccctaactccgcccatcccgcccctaactccgcccagttccgcccattctccgccccatggctgactaattttttttatttatgcagaggccgaggccgcctcggcctctgagctattccagaagtagtgaggaggcttttttggaggcctaggcttttgcaaaaagctaacttgtttattgcagcttataatggttacaaataaagcaatagcatcacaaatttcacaaataaagcatttttttcactgcattctagttgtggtttgtccaaactcatcaatgtatcttatcatgtctggatccgctgcattaatgaatcggccaacgcgcggggagaggcggtttgcgtattgggcgctcttccgcttcctcgctcactgactcgctgcgctcggtcgttcggctgcggcgagcggtatcagctcactcaaaggcggtaatacggttatccacagaatcaggggataacgcaggaaagaacatgtgagcaaaaggccagcaaaaggccaggaaccgtaaaaaggccgcgttgctggcgtttttccataggctccgcccccctgacgagcatcacaaaaatcgacgctcaagtcagaggtggcgaaacccgacaggactataaagataccaggcgtttccccctggaagctccctcgtgcgctctcctgttccgaccctgccgcttaccggatacctgtccgcctttctcccttcgggaagcgtggcgctttctcatagctcacgctgtaggtatctcagttcggtgtaggtcgttcgctccaagctgggctgtgtgcacgaaccccccgttcagcccgaccgctgcgccttatccggtaactatcgtcttgagtccaacccggtaagacacgacttatcgccactggcagcagccactggtaacaggattagcagagcgaggtatgtaggcggtgctacagagttcttgaagtggtggcctaactacggctacactagaagaacagtatttggtatctgcgctctgctgaagccagttaccttcggaaaaagagttggtagctcttgatccggcaaacaaaccaccgctggtagcggtggtttttttgtttgcaagcagcagattacgcgcagaaaaaaaggatctcaagaagatcctttgatcttttctacggggtctgacgctcagtggaacgaaaactcacgttaagggattttggtcatgagattatcaaaaaggatcttcacctagatccttttaaattaaaaatgaagttttaaatcaatctaaagtatatatgagtaaacttggtctgacagttaccaatgcttaatcagtgaggcacctatctcagcgatctgtctatttcgttcatccatagttgcctgactccccgtcgtgtagataactacgatacgggagggcttaccatctggccccagtgctgcaatgataccgcgagacccacgctcaccggctccagatttatcagcaataaaccagccagccggaagggccgagcgcagaagtggtcctgcaactttatccgcctccatccagtctattaattgttgccgggaagctagagtaagtagttcgccagttaatagtttgcgcaacgttgttgccattgctacaggcatcgtggtgtcacgctcgtcgtttggtatggcttcattcagctccggttcccaacgatcaaggcgagttacatgatcccccatgttgtgcaaaaaagcggttagctccttcggtcctccgatcgttgtcagaagtaagttggccgcagtgttatcactcatggttatggcagcactgcataattctcttactgtcatgccatccgtaagatgcttttctgtgactggtgagtactcaaccaagtcattctgagaatagtgtatgcggcgaccgagttgctcttgcccggcgtcaatacgggataataccgcgccacatagcagaactttaaaagtgctcatcattggaaaacgttcttcggggcgaaaactctcaaggatcttaccgctgttgagatccagttcgatgtaacccactcgtgcacccaactgatcttcagcatcttttactttcaccagcgtttctgggtgagcaaaaacaggaaggcaaaatgccgcaaaaaagggaataagggcgacacggaaatgttgaatactcatactcttcctttttcaatattattgaagcatttatcagggttattgtctcatgagcggatacatatttgaatgtatttagaaaaataaacaaataggggttccgcgcacatttccccgaaaagtgccacctgggtcgacattgattattgactagtaatagtaatcaattacggggtcattagttcatagcccatatatggagttccg

SEQ ID NO: 3957 - RNA, 5729 nt, Homo sapiens
  source 1..5729: mol_type = other RNA
cgttacataacttacggtaaatggcccgcctggctgaccgcccaacgacccccgcccattgacgtcaataatgacgtatgttcccatagtaacgccaatagggactttccattgacgtcaatgggtggagtatttacggtaaactgcccacttggcagtacatcaagtgtatcatatgccaagtacgccccctattgacgtcaatgacggtaaatggcccgcctggcattatgcccagtacatgaccttatgggactttcctacttggcagtacatctacgtattagtcatcgctattaccatggtgatgcggttttggcagtacatcaatgggcgtggatagcggtttgactcacggggatttccaagtctccaccccattgacgtcaatgggagtttgttttggcaccaaaatcaacgggactttccaaaatgtcgtaacaactccgccccattgacgcaaatgggcggtaggcgtgtacggtgggaggtctatataagcagagctggtttagtgaaccgtcagatccgctagcgctaccggactcagatcgccaccatgtacccctacgacgtgccagactacgcccctgcggcaaaaaagaaaaagttggacggcggctctggcggcggaggatctggcggaggtggaagcggaggaccgcctaagaagaagcagaagctggaacggctgaagaaactggacaagcccacactgcacacctgtaacaagaccagcttcgccaaggccttcctgcctaacgagacataccggcagcggctgctggactatatcgccatcattcaccagctggccgaccacgcctctcacgccctgaagttttacatcctgagcacctccaccagcagcttccctgtggtgcacgaggataccatcgaggccatcctgtacctgctgaacaagggcgaagcctggcatcccagaaaagaggccaagaaggcctggcgggattgcctgctgccttacgtgcagagatactgccagatcgtgggcttcattcaccccaacctgagaggcgagcagcagagcatcaactacctgaccgtgtccatgatgaccaacctgaaagtgaacgtgcaagagcacttcatgcagatgctgctgcggtacatcaatctgcgcttcgacgtgaagggccagaagcagagactgcctcctaagagcgacgcccgcaaggcctttttcacccggctgagatacctgaagtccgtgttcctgttcgacgtggtgcccgagctggaattcctggacgatctgacccctctggaaagcgaggtgctggaagagatctggtccctggacctgccttttctgcccaacgatcctctggcctacgccatcgtggccgatcctatgagcttcttcccagcctactgcaagctgagcggcctgtacgagcagtacggcttccagcggtttagcgccattcctctgcggagaagcctgatccagtctcacgtgcggatcgacaccatcatcctgtatcagcacatcctgtgcatcaccagacgggacgccgagacagtggaaaagcgcgacctgtggatgagagtgtgcaacctgtgcaccaaagccttccggtccagatgcggcatgcacttcgagggcagcatcacaacagatggcgccagcgtgtccgtgtacctgaaacaccctgaggccgataagtacggcaagagaggcgccagaaagtccgccaatactgtggccgccgaagtgaaggccctgtacgtggaaaacaacctgcctgcctgtagagccgccgagaacgtggtggtcatcgaccccaacaagcgggatatcctgtactgccaggacagcaacggcaccaccttcagatacaccgccaaccagagagccgtggaaaccggcagcagaagattcgccaagcggcgggaagccatgaaggaagaagccggcgttgacctgatcgagagcagaatccctagccacaagaccatgaacctgatggacttcaccagatacctgctcgtgcggagagccgactgggacagacggaaagagttctactctcaccccgctcacacccggtggaagtggcacagcttcatcaaccggcagaagtccgagagcgacctgatcagcaacatgcggaacaaatacggcgagaacttcaccgtggtcatgggcgattggagcgacgctggaagaaccgccagattccagaccagcagcaagaccaaaggctggcggaccctgttcaagcggaaccggatcgattgcttcctgctggacgagtacaagacctccagcgtgtgccctagatgcagcagcagcgagttcgtggaaaagaagttcaagacccggcctcacagcagaccctggcgaagaagagagggcaagatcgagaaggtgcacggcctgctgggctgcaccaatcctaattgtctgcagcaggcctggaccagcggcatgagatactggaaccgggacatgctgagcacatgcaacatgctgctgatcgtgcggtccatgctggatggccatggcagacctgaggtgttctctagatctgtgcctgccgtggcctgactagcataaccccttggggcgcactcctcaggtgcaggctgcctatcagaaggtggtggctggtgtggccaatgccctggctcacaaataccactgagatctttttccctctgccaaaaattatggggacatcatgaagccccttgagcatctgacttctggctaataaaggaaatttattttcattgcaatagtgtgttggaattttttgtgtctctcactcggaaggacatatgggagggcaaatcatttaaaacatcagaatgagtatttggtttagagtttggcaacatatgcccatatgctggctgccatgaacaaaggttggctataaagaggtcatcagtatatgaaacagccccctgctgtccattccttattccatagaaaagccttgacttgaggttagattttttttatattttgttttgtgttatttttttctttaacatccctaaaattttccttacatgttttactagccagatttttcctcctctcctgactactcccagtcatagctgtccctcttctcttatggagatccctcgacctgcagcccaagcttggcgtaatcatggtcatagctgtttcctgtgtgaaattgttatccgctcacaattccacacaacatacgagccggaagcataaagtgtaaagcctggggtgcctaatgagtgagctaactcacattaattgcgttgcgctcactgcccgctttccagtcgggaaacctgtcgtgccagcggatccgcatctcaattagtcagcaaccatagtcccgcccctaactccgcccatcccgcccctaactccgcccagttccgcccattctccgccccatggctgactaattttttttatttatgcagaggccgaggccgcctcggcctctgagctattccagaagtagtgaggaggcttttttggaggcctaggcttttgcaaaaagctaacttgtttattgcagcttataatggttacaaataaagcaatagcatcacaaatttcacaaataaagcatttttttcactgcattctagttgtggtttgtccaaactcatcaatgtatcttatcatgtctggatccgctgcattaatgaatcggccaacgcgcggggagaggcggtttgcgtattgggcgctcttccgcttcctcgctcactgactcgctgcgctcggtcgttcggctgcggcgagcggtatcagctcactcaaaggcggtaatacggttatccacagaatcaggggataacgcaggaaagaacatgtgagcaaaaggccagcaaaaggccaggaaccgtaaaaaggccgcgttgctggcgtttttccataggctccgcccccctgacgagcatcacaaaaatcgacgctcaagtcagaggtggcgaaacccgacaggactataaagataccaggcgtttccccctggaagctccctcgtgcgctctcctgttccgaccctgccgcttaccggatacctgtccgcctttctcccttcgggaagcgtggcgctttctcatagctcacgctgtaggtatctcagttcggtgtaggtcgttcgctccaagctgggctgtgtgcacgaaccccccgttcagcccgaccgctgcgccttatccggtaactatcgtcttgagtccaacccggtaagacacgacttatcgccactggcagcagccactggtaacaggattagcagagcgaggtatgtaggcggtgctacagagttcttgaagtggtggcctaactacggctacactagaagaacagtatttggtatctgcgctctgctgaagccagttaccttcggaaaaagagttggtagctcttgatccggcaaacaaaccaccgctggtagcggtggtttttttgtttgcaagcagcagattacgcgcagaaaaaaaggatctcaagaagatcctttgatcttttctacggggtctgacgctcagtggaacgaaaactcacgttaagggattttggtcatgagattatcaaaaaggatcttcacctagatccttttaaattaaaaatgaagttttaaatcaatctaaagtatatatgagtaaacttggtctgacagttaccaatgcttaatcagtgaggcacctatctcagcgatctgtctatttcgttcatccatagttgcctgactccccgtcgtgtagataactacgatacgggagggcttaccatctggccccagtgctgcaatgataccgcgagacccacgctcaccggctccagatttatcagcaataaaccagccagccggaagggccgagcgcagaagtggtcctgcaactttatccgcctccatccagtctattaattgttgccgggaagctagagtaagtagttcgccagttaatagtttgcgcaacgttgttgccattgctacaggcatcgtggtgtcacgctcgtcgtttggtatggcttcattcagctccggttcccaacgatcaaggcgagttacatgatcccccatgttgtgcaaaaaagcggttagctccttcggtcctccgatcgttgtcagaagtaagttggccgcagtgttatcactcatggttatggcagcactgcataattctcttactgtcatgccatccgtaagatgcttttctgtgactggtgagtactcaaccaagtcattctgagaatagtgtatgcggcgaccgagttgctcttgcccggcgtcaatacgggataataccgcgccacatagcagaactttaaaagtgctcatcattggaaaacgttcttcggggcgaaaactctcaaggatcttaccgctgttgagatccagttcgatgtaacccactcgtgcacccaactgatcttcagcatcttttactttcaccagcgtttctgggtgagcaaaaacaggaaggcaaaatgccgcaaaaaagggaataagggcgacacggaaatgttgaatactcatactcttcctttttcaatattattgaagcatttatcagggttattgtctcatgagcggatacatatttgaatgtatttagaaaaataaacaaataggggttccgcgcacatttccccgaaaagtgccacctgggtcgacattgattattgactagtaatagtaatcaattacggggtcattagttcatagcccatatatggagttccg

SEQ ID NO: 3958 - RNA, 5729 nt, Homo sapiens
  source 1..5729: mol_type = other RNA
cgttacataacttacggtaaatggcccgcctggctgaccgcccaacgacccccgcccattgacgtcaataatgacgtatgttcccatagtaacgccaatagggactttccattgacgtcaatgggtggagtatttacggtaaactgcccacttggcagtacatcaagtgtatcatatgccaagtacgccccctattgacgtcaatgacggtaaatggcccgcctggcattatgcccagtacatgaccttatgggactttcctacttggcagtacatctacgtattagtcatcgctattaccatggtgatgcggttttggcagtacatcaatgggcgtggatagcggtttgactcacggggatttccaagtctccaccccattgacgtcaatgggagtttgttttggcaccaaaatcaacgggactttccaaaatgtcgtaacaactccgccccattgacgcaaatgggcggtaggcgtgtacggtgggaggtctatataagcagagctggtttagtgaaccgtcagatccgctagcgctaccggactcagatcgccaccatgtacccctacgacgtgccagactacgcccctgcggcaaaaaagaaaaagttggacggcggctctggcggcggaggatctggcggaggtggaagcggaggaccgcctaagaagaagcagaagctggaacggctgaagaaactggacaagcccacactgcacacctgtaacaagaccagcttcgccaaggccttcctgcctaacgagacataccggcagcggctgctggactatatcgccatcattcaccagctggccgaccacgcctctcacgccctgaagttttacatcctgagcacctccaccagcagcttccctgtggtgcacgaggataccatcgaggccatcctgtacctgctgaacaagggcgaagcctggcatcccagaaaagaggccaagaaggcctggcgggattgcctgctgccttacgtgcagagatactgccagatcgtgggcttcattcaccccaacctgagaggcgagcagcagagcatcaactacctgaccgtgtccatgatgaccaacctgaaagtgaacgtgcaagagcacttcatgcagatgctgctgcggtacatcaatctgcgcttcgacgtgaagggccagaagcagagactgcctcctaagagcgacgcccgcaaggcctttttcacccggctgagatacctgaagtccgtgttcctgttcgacgtggtgcccgagctggaattcctggacgatctgacccctctggaaagcgaggtgctggaagagatctggtccctggacctgccttttctgcccaacgatcctctggcctacgccatcgtggccgatcctatgagcttcttcccagcctactgcaagctgagcggcctgtacgagcagtacggcttccagcggtttagcgccattcctctgcggagaagcctgatccagtctcacgtgcggatcgacaccatcatcctgtatcagcacatcctgtgcatcaccagacgggacgccgagacagtggaaaaggacgacctgtggatgagagtgtgcaacctgcggaccaaagccttccggtccagatgcggcatgcacttcgagggcagcatcacaacagatggcgccagcgtgtccgtgtacctgaaacaccctgaggccgataagtacggcaagagaggcgccagaaagtccgccaatactgtggccgccgaagtgaaggccctgtacgtggaaaacaacctgcctgcctgtagagccgccgagaacgtggtggtcatcgaccccaacaagcgggatatcctgtactgccaggacagcaacggcaccaccttcagatacaccgccaaccagagagccgtggaaaccggcagcagaagattcgccaagcggcgggaagccatgaaggaagaagccggcgttgacctgatcgagagcagaatccctagccacaagaccatgaacctgatggacttcaccagatacctgctcgtgcggagagccgactgggacagacggaaagagttctactctcaccccgctcacacccggtggaagtggcacagcttcatcaaccggcagaagtccgagagcgacctgatcagcaacatgcggaacaaatacggcgagaacttcaccgtggtcatgggcgattggagcgacgctggaagaaccgccagattccagaccagcagcaagaccaaaggctggcggaccctgttcaagcggaaccggatcgattgcttcctgctggacgagtacaagacctccagcgtgtgccctagatgcagcagcagcgagttcgtggaaaagaagttcaagacccggcctcacagcagaccctggcgaagaagagagggcaagatcgagaaggtgcacggcctgctgggctgcaccaatcctaattgtctgcagcaggcctggaccagcggcatgagatactggaaccgggacatgctgagcacatgcaacatgctgctgatcgtgcggtccatgctggatggccatggcagacctgaggtgttctctagatctgtgcctgccgtggcctgactagcataaccccttggggcgcactcctcaggtgcaggctgcctatcagaaggtggtggctggtgtggccaatgccctggctcacaaataccactgagatctttttccctctgccaaaaattatggggacatcatgaagccccttgagcatctgacttctggctaataaaggaaatttattttcattgcaatagtgtgttggaattttttgtgtctctcactcggaaggacatatgggagggcaaatcatttaaaacatcagaatgagtatttggtttagagtttggcaacatatgcccatatgctggctgccatgaacaaaggttggctataaagaggtcatcagtatatgaaacagccccctgctgtccattccttattccatagaaaagccttgacttgaggttagattttttttatattttgttttgtgttatttttttctttaacatccctaaaattttccttacatgttttactagccagatttttcctcctctcctgactactcccagtcatagctgtccctcttctcttatggagatccctcgacctgcagcccaagcttggcgtaatcatggtcatagctgtttcctgtgtgaaattgttatccgctcacaattccacacaacatacgagccggaagcataaagtgtaaagcctggggtgcctaatgagtgagctaactcacattaattgcgttgcgctcactgcccgctttccagtcgggaaacctgtcgtgccagcggatccgcatctcaattagtcagcaaccatagtcccgcccctaactccgcccatcccgcccctaactccgcccagttccgcccattctccgccccatggctgactaattttttttatttatgcagaggccgaggccgcctcggcctctgagctattccagaagtagtgaggaggcttttttggaggcctaggcttttgcaaaaagctaacttgtttattgcagcttataatggttacaaataaagcaatagcatcacaaatttcacaaataaagcatttttttcactgcattctagttgtggtttgtccaaactcatcaatgtatcttatcatgtctggatccgctgcattaatgaatcggccaacgcgcggggagaggcggtttgcgtattgggcgctcttccgcttcctcgctcactgactcgctgcgctcggtcgttcggctgcggcgagcggtatcagctcactcaaaggcggtaatacggttatccacagaatcaggggataacgcaggaaagaacatgtgagcaaaaggccagcaaaaggccaggaaccgtaaaaaggccgcgttgctggcgtttttccataggctccgcccccctgacgagcatcacaaaaatcgacgctcaagtcagaggtggcgaaacccgacaggactataaagataccaggcgtttccccctggaagctccctcgtgcgctctcctgttccgaccctgccgcttaccggatacctgtccgcctttctcccttcgggaagcgtggcgctttctcatagctcacgctgtaggtatctcagttcggtgtaggtcgttcgctccaagctgggctgtgtgcacgaaccccccgttcagcccgaccgctgcgccttatccggtaactatcgtcttgagtccaacccggtaagacacgacttatcgccactggcagcagccactggtaacaggattagcagagcgaggtatgtaggcggtgctacagagttcttgaagtggtggcctaactacggctacactagaagaacagtatttggtatctgcgctctgctgaagccagttaccttcggaaaaagagttggtagctcttgatccggcaaacaaaccaccgctggtagcggtggtttttttgtttgcaagcagcagattacgcgcagaaaaaaaggatctcaagaagatcctttgatcttttctacggggtctgacgctcagtggaacgaaaactcacgttaagggattttggtcatgagattatcaaaaaggatcttcacctagatccttttaaattaaaaatgaagttttaaatcaatctaaagtatatatgagtaaacttggtctgacagttaccaatgcttaatcagtgaggcacctatctcagcgatctgtctatttcgttcatccatagttgcctgactccccgtcgtgtagataactacgatacgggagggcttaccatctggccccagtgctgcaatgataccgcgagacccacgctcaccggctccagatttatcagcaataaaccagccagccggaagggccgagcgcagaagtggtcctgcaactttatccgcctccatccagtctattaattgttgccgggaagctagagtaagtagttcgccagttaatagtttgcgcaacgttgttgccattgctacaggcatcgtggtgtcacgctcgtcgtttggtatggcttcattcagctccggttcccaacgatcaaggcgagttacatgatcccccatgttgtgcaaaaaagcggttagctccttcggtcctccgatcgttgtcagaagtaagttggccgcagtgttatcactcatggttatggcagcactgcataattctcttactgtcatgccatccgtaagatgcttttctgtgactggtgagtactcaaccaagtcattctgagaatagtgtatgcggcgaccgagttgctcttgcccggcgtcaatacgggataataccgcgccacatagcagaactttaaaagtgctcatcattggaaaacgttcttcggggcgaaaactctcaaggatcttaccgctgttgagatccagttcgatgtaacccactcgtgcacccaactgatcttcagcatcttttactttcaccagcgtttctgggtgagcaaaaacaggaaggcaaaatgccgcaaaaaagggaataagggcgacacggaaatgttgaatactcatactcttcctttttcaatattattgaagcatttatcagggttattgtctcatgagcggatacatatttgaatgtatttagaaaaataaacaaataggggttccgcgcacatttccccgaaaagtgccacctgggtcgacattgattattgactagtaatagtaatcaattacggggtcattagttcatagcccatatatggagttccg

SEQ ID NO: 3959 - RNA, 5729 nt, Homo sapiens
  source 1..5729: mol_type = other RNA
cgttacataacttacggtaaatggcccgcctggctgaccgcccaacgacccccgcccattgacgtcaataatgacgtatgttcccatagtaacgccaatagggactttccattgacgtcaatgggtggagtatttacggtaaactgcccacttggcagtacatcaagtgtatcatatgccaagtacgccccctattgacgtcaatgacggtaaatggcccgcctggcattatgcccagtacatgaccttatgggactttcctacttggcagtacatctacgtattagtcatcgctattaccatggtgatgcggttttggcagtacatcaatgggcgtggatagcggtttgactcacggggatttccaagtctccaccccattgacgtcaatgggagtttgttttggcaccaaaatcaacgggactttccaaaatgtcgtaacaactccgccccattgacgcaaatgggcggtaggcgtgtacggtgggaggtctatataagcagagctggtttagtgaaccgtcagatccgctagcgctaccggactcagatcgccaccatgtacccctacgacgtgccagactacgcccctgcggcaaaaaagaaaaagttggacggcggctctggcggcggaggatctggcggaggtggaagcggaggaccgcctaagaagaagcagaagctggaacggctgaagaaactggacaagcccacactgcacacctgtaacaagaccagcttcgccaaggccttcctgcctaacgagacataccggcagcggctgctggactatatcgccatcattcaccagctggccgaccacgcctctcacgccctgaagttttacatcctgagcacctccaccagcagcttccctgtggtgcacgaggataccatcgaggccatcctgtacctgctgaacaagggcgaagcctggcatcccagaaaagaggccaagaaggcctggcgggattgcctgctgccttacgtgcagagatactgccagatcgtgggcttcattcaccccaacctgagaggcgagcagcagagcatcaactacctgaccgtgtccatgatgaccaacctgaaagtgaacgtgcaagagcacttcatgcagatgctgctgcggtacatcaatctgcgcttcgacgtgaagggccagaagcagagactgcctcctaagagcgacgcccgcaaggcctttttcacccggctgagatacctgaagtccgtgttcctgttcgacgtggtgcccgagctggaattcctggacgatctgacccctctggaaagcgaggtgctggaagagatctggtccctggacctgccttttctgcccaacgatcctctggcctacgccatcgtggccgatcctatgagcttcttcccagcctactgcaagctgagcggcctgtacgagcagtacggcttccagcggtttagcgccattcctctgcggagaagcctgatccagtctcacgtgcggatcgacaccatcatcctgtatcagcacatcctgtgcatcaccagacgggacgccgagacagtggaaaaggacgacctgtggatgagagtgtgcaacctgtgcaccaaagccttccggtccagatgcggcatgcacttcgagggcagcatcacaacagatggcgccagcgtgtccgtgtacctgaaacaccctgaggccgataagtacggcaagagaggcgccagaaagtccgccaatactgtggccgccgaagtgaaggccctgtacgtggaaaacaacctgcctgcctgtagagccgccgagaacgtggtggtcatcgaccccaacaagcgggatatcctgtactgccaggacagcaacggcaccaccttcagatacaccgccaaccagagagccgtggaaaccggcagcagaagattcgccaagcggcgggaagccatgaaggaagaagccggcgttgacctgatcgagagcagaatccctagccacaagaccatgaacctgatggacttcaccagatacctgctcgtgcggagagccgactgggacagacggaaagagttctactctcaccccgctcacacccggtggaagtggcacagcttcatcaaccggcagaagtccgagagcaagctgatcagcaacatgcggaacaaatacggcgagaacttcaccgtggtcatgggcgattggagcgacgctggaagaaccgccagattccagaccagcagcaagaccaaaggctggcggaccctgttcaagcggaaccggatcgattgcttcctgctggacgagtacaagacctccagcgtgtgccctagatgcagcagcagcgagttcgtggaaaagaagttcaagacccggcctcacagcagaccctggcgaagaagagagggcaagatcgagaaggtgcacggcctgctgggctgcaccaatcctaattgtctgcagcaggcctggaccagcggcatgagatactggaaccgggacatgctgagcacatgcaacatgctgctgatcgtgcggtccatgctggatggccatggcagacctgaggtgttctctagatctgtgcctgccgtggcctgactagcataaccccttggggcgcactcctcaggtgcaggctgcctatcagaaggtggtggctggtgtggccaatgccctggctcacaaataccactgagatctttttccctctgccaaaaattatggggacatcatgaagccccttgagcatctgacttctggctaataaaggaaatttattttcattgcaatagtgtgttggaattttttgtgtctctcactcggaaggacatatgggagggcaaatcatttaaaacatcagaatgagtatttggtttagagtttggcaacatatgcccatatgctggctgccatgaacaaaggttggctataaagaggtcatcagtatatgaaacagccccctgctgtccattccttattccatagaaaagccttgacttgaggttagattttttttatattttgttttgtgttatttttttctttaacatccctaaaattttccttacatgttttactagccagatttttcctcctctcctgactactcccagtcatagctgtccctcttctcttatggagatccctcgacctgcagcccaagcttggcgtaatcatggtcatagctgtttcctgtgtgaaattgttatccgctcacaattccacacaacatacgagccggaagcataaagtgtaaagcctggggtgcctaatgagtgagctaactcacattaattgcgttgcgctcactgcccgctttccagtcgggaaacctgtcgtgccagcggatccgcatctcaattagtcagcaaccatagtcccgcccctaactccgcccatcccgcccctaactccgcccagttccgcccattctccgccccatggctgactaattttttttatttatgcagaggccgaggccgcctcggcctctgagctattccagaagtagtgaggaggcttttttggaggcctaggcttttgcaaaaagctaacttgtttattgcagcttataatggttacaaataaagcaatagcatcacaaatttcacaaataaagcatttttttcactgcattctagttgtggtttgtccaaactcatcaatgtatcttatcatgtctggatccgctgcattaatgaatcggccaacgcgcggggagaggcggtttgcgtattgggcgctcttccgcttcctcgctcactgactcgctgcgctcggtcgttcggctgcggcgagcggtatcagctcactcaaaggcggtaatacggttatccacagaatcaggggataacgcaggaaagaacatgtgagcaaaaggccagcaaaaggccaggaaccgtaaaaaggccgcgttgctggcgtttttccataggctccgcccccctgacgagcatcacaaaaatcgacgctcaagtcagaggtggcgaaacccgacaggactataaagataccaggcgtttccccctggaagctccctcgtgcgctctcctgttccgaccctgccgcttaccggatacctgtccgcctttctcccttcgggaagcgtggcgctttctcatagctcacgctgtaggtatctcagttcggtgtaggtcgttcgctccaagctgggctgtgtgcacgaaccccccgttcagcccgaccgctgcgccttatccggtaactatcgtcttgagtccaacccggtaagacacgacttatcgccactggcagcagccactggtaacaggattagcagagcgaggtatgtaggcggtgctacagagttcttgaagtggtggcctaactacggctacactagaagaacagtatttggtatctgcgctctgctgaagccagttaccttcggaaaaagagttggtagctcttgatccggcaaacaaaccaccgctggtagcggtggtttttttgtttgcaagcagcagattacgcgcagaaaaaaaggatctcaagaagatcctttgatcttttctacggggtctgacgctcagtggaacgaaaactcacgttaagggattttggtcatgagattatcaaaaaggatcttcacctagatccttttaaattaaaaatgaagttttaaatcaatctaaagtatatatgagtaaacttggtctgacagttaccaatgcttaatcagtgaggcacctatctcagcgatctgtctatttcgttcatccatagttgcctgactccccgtcgtgtagataactacgatacgggagggcttaccatctggccccagtgctgcaatgataccgcgagacccacgctcaccggctccagatttatcagcaataaaccagccagccggaagggccgagcgcagaagtggtcctgcaactttatccgcctccatccagtctattaattgttgccgggaagctagagtaagtagttcgccagttaatagtttgcgcaacgttgttgccattgctacaggcatcgtggtgtcacgctcgtcgtttggtatggcttcattcagctccggttcccaacgatcaaggcgagttacatgatcccccatgttgtgcaaaaaagcggttagctccttcggtcctccgatcgttgtcagaagtaagttggccgcagtgttatcactcatggttatggcagcactgcataattctcttactgtcatgccatccgtaagatgcttttctgtgactggtgagtactcaaccaagtcattctgagaatagtgtatgcggcgaccgagttgctcttgcccggcgtcaatacgggataataccgcgccacatagcagaactttaaaagtgctcatcattggaaaacgttcttcggggcgaaaactctcaaggatcttaccgctgttgagatccagttcgatgtaacccactcgtgcacccaactgatcttcagcatcttttactttcaccagcgtttctgggtgagcaaaaacaggaaggcaaaatgccgcaaaaaagggaataagggcgacacggaaatgttgaatactcatactcttcctttttcaatattattgaagcatttatcagggttattgtctcatgagcggatacatatttgaatgtatttagaaaaataaacaaataggggttccgcgcacatttccccgaaaagtgccacctgggtcgacattgattattgactagtaatagtaatcaattacggggtcattagttcatagcccatatatggagttccg

SEQ ID NO: 3960 - RNA, 5729 nt, Homo sapiens
  source 1..5729: mol_type = other RNA
cgttacataacttacggtaaatggcccgcctggctgaccgcccaacgacccccgcccattgacgtcaataatgacgtatgttcccatagtaacgccaatagggactttccattgacgtcaatgggtggagtatttacggtaaactgcccacttggcagtacatcaagtgtatcatatgccaagtacgccccctattgacgtcaatgacggtaaatggcccgcctggcattatgcccagtacatgaccttatgggactttcctacttggcagtacatctacgtattagtcatcgctattaccatggtgatgcggttttggcagtacatcaatgggcgtggatagcggtttgactcacggggatttccaagtctccaccccattgacgtcaatgggagtttgttttggcaccaaaatcaacgggactttccaaaatgtcgtaacaactccgccccattgacgcaaatgggcggtaggcgtgtacggtgggaggtctatataagcagagctggtttagtgaaccgtcagatccgctagcgctaccggactcagatcgccaccatgtacccctacgacgtgccagactacgcccctgcggcaaaaaagaaaaagttggacggcggctctggcggcggaggatctggcggaggtggaagcggaggaccgcctaagaagaagcagaagctggaacggctgaagaaactggacaagcccacactgcacacctgtaacaagaccagcttcgccaaggccttcctgcctaacgagacataccggcagcggctgctggactatatcgccatcattcaccagctggccgaccacgcctctcacgccctgaagttttacatcctgagcacctccaccagcagcttccctgtggtgcacgaggataccatcgaggccatcctgtacctgctgaacaagggcgaagcctggcatcccagaaaagaggccaagaaggcctggcgggattgcctgctgccttacgtgcagagatactgccagatcgtgggcttcattcaccccaacctgagaggcgagcagcagagcatcaactacctgaccgtgtccatgatgaccaacctgaaagtgaacgtgcaagagcacttcatgcagatgctgctgcggtacatcaatctgcgcttcgacgtgaagggccagaagcagagactgcctcctaagagcgacgcccgcaaggcctttttcacccggctgagatacctgaagtccgtgttcctgttcgacgtggtgcccgagctggaattcctggacgatctgacccctctggaaagcgaggtgctggaagagatctggtccctggacctgccttttctgcccaacgatcctctggcctacgccatcgtggccgatcctatgagcttcttcccagcctactgcaagctgagcggcctgtacgagcagtacggcttccagcggtttagcgccattcctctgcggagaagcctgatccagtctcacgtgcggatcgacaccatcatcctgtatcagcacatcctgtgcatcaccagacgggacgccgagacagtggaaaaggacgacctgtggatgagagtgtgcaacctgtgcaccaaagccttccggtccagatgcggcatgcacttcgagggcagcatcacaacagatggcgccagcgtgtccgtgtacctgaaacaccctgaggccgataagtacggcaagagaggcgccagaaagtccgccaatactgtggccgccgaagtgaaggccctgtacgtggaaaacaacctgcctgcctgtagagccgccgagaacgtggtggtcatcgaccccaacaagcgggatatcctgtactgccaggacagcaacggcaccaccttcagatacaccgccaaccagagagccgtggaaaccggcagcagaagattcgccaagcggcgggaagccatgaaggaagaagccggcgttgacctgatcgagagcagaatccctagccacaagaccatgaacctgatggacttcaccagatacctgctcgtgcggagagccgactgggacagacggaaagagttctactctcaccccgctcacacccggtggaagtggcacagcttcatcaaccggcagaagtccgagagcgacctgatcagcaacatgcggaacaaatacggccgcaacttcaccgtggtcatgggcgattggagcgacgctggaagaaccgccagattccagaccagcagcaagaccaaaggctggcggaccctgttcaagcggaaccggatcgattgcttcctgctggacgagtacaagacctccagcgtgtgccctagatgcagcagcagcgagttcgtggaaaagaagttcaagacccggcctcacagcagaccctggcgaagaagagagggcaagatcgagaaggtgcacggcctgctgggctgcaccaatcctaattgtctgcagcaggcctggaccagcggcatgagatactggaaccgggacatgctgagcacatgcaacatgctgctgatcgtgcggtccatgctggatggccatggcagacctgaggtgttctctagatctgtgcctgccgtggcctgactagcataaccccttggggcgcactcctcaggtgcaggctgcctatcagaaggtggtggctggtgtggccaatgccctggctcacaaataccactgagatctttttccctctgccaaaaattatggggacatcatgaagccccttgagcatctgacttctggctaataaaggaaatttattttcattgcaatagtgtgttggaattttttgtgtctctcactcggaaggacatatgggagggcaaatcatttaaaacatcagaatgagtatttggtttagagtttggcaacatatgcccatatgctggctgccatgaacaaaggttggctataaagaggtcatcagtatatgaaacagccccctgctgtccattccttattccatagaaaagccttgacttgaggttagattttttttatattttgttttgtgttatttttttctttaacatccctaaaattttccttacatgttttactagccagatttttcctcctctcctgactactcccagtcatagctgtccctcttctcttatggagatccctcgacctgcagcccaagcttggcgtaatcatggtcatagctgtttcctgtgtgaaattgttatccgctcacaattccacacaacatacgagccggaagcataaagtgtaaagcctggggtgcctaatgagtgagctaactcacattaattgcgttgcgctcactgcccgctttccagtcgggaaacctgtcgtgccagcggatccgcatctcaattagtcagcaaccatagtcccgcccctaactccgcccatcccgcccctaactccgcccagttccgcccattctccgccccatggctgactaattttttttatttatgcagaggccgaggccgcctcggcctctgagctattccagaagtagtgaggaggcttttttggaggcctaggcttttgcaaaaagctaacttgtttattgcagcttataatggttacaaataaagcaatagcatcacaaatttcacaaataaagcatttttttcactgcattctagttgtggtttgtccaaactcatcaatgtatcttatcatgtctggatccgctgcattaatgaatcggccaacgcgcggggagaggcggtttgcgtattgggcgctcttccgcttcctcgctcactgactcgctgcgctcggtcgttcggctgcggcgagcggtatcagctcactcaaaggcggtaatacggttatccacagaatcaggggataacgcaggaaagaacatgtgagcaaaaggccagcaaaaggccaggaaccgtaaaaaggccgcgttgctggcgtttttccataggctccgcccccctgacgagcatcacaaaaatcgacgctcaagtcagaggtggcgaaacccgacaggactataaagataccaggcgtttccccctggaagctccctcgtgcgctctcctgttccgaccctgccgcttaccggatacctgtccgcctttctcccttcgggaagcgtggcgctttctcatagctcacgctgtaggtatctcagttcggtgtaggtcgttcgctccaagctgggctgtgtgcacgaaccccccgttcagcccgaccgctgcgccttatccggtaactatcgtcttgagtccaacccggtaagacacgacttatcgccactggcagcagccactggtaacaggattagcagagcgaggtatgtaggcggtgctacagagttcttgaagtggtggcctaactacggctacactagaagaacagtatttggtatctgcgctctgctgaagccagttaccttcggaaaaagagttggtagctcttgatccggcaaacaaaccaccgctggtagcggtggtttttttgtttgcaagcagcagattacgcgcagaaaaaaaggatctcaagaagatcctttgatcttttctacggggtctgacgctcagtggaacgaaaactcacgttaagggattttggtcatgagattatcaaaaaggatcttcacctagatccttttaaattaaaaatgaagttttaaatcaatctaaagtatatatgagtaaacttggtctgacagttaccaatgcttaatcagtgaggcacctatctcagcgatctgtctatttcgttcatccatagttgcctgactccccgtcgtgtagataactacgatacgggagggcttaccatctggccccagtgctgcaatgataccgcgagacccacgctcaccggctccagatttatcagcaataaaccagccagccggaagggccgagcgcagaagtggtcctgcaactttatccgcctccatccagtctattaattgttgccgggaagctagagtaagtagttcgccagttaatagtttgcgcaacgttgttgccattgctacaggcatcgtggtgtcacgctcgtcgtttggtatggcttcattcagctccggttcccaacgatcaaggcgagttacatgatcccccatgttgtgcaaaaaagcggttagctccttcggtcctccgatcgttgtcagaagtaagttggccgcagtgttatcactcatggttatggcagcactgcataattctcttactgtcatgccatccgtaagatgcttttctgtgactggtgagtactcaaccaagtcattctgagaatagtgtatgcggcgaccgagttgctcttgcccggcgtcaatacgggataataccgcgccacatagcagaactttaaaagtgctcatcattggaaaacgttcttcggggcgaaaactctcaaggatcttaccgctgttgagatccagttcgatgtaacccactcgtgcacccaactgatcttcagcatcttttactttcaccagcgtttctgggtgagcaaaaacaggaaggcaaaatgccgcaaaaaagggaataagggcgacacggaaatgttgaatactcatactcttcctttttcaatattattgaagcatttatcagggttattgtctcatgagcggatacatatttgaatgtatttagaaaaataaacaaataggggttccgcgcacatttccccgaaaagtgccacctgggtcgacattgattattgactagtaatagtaatcaattacggggtcattagttcatagcccatatatggagttccg

SEQ ID NO: 3961 - RNA, 5729 nt, Homo sapiens
  source 1..5729: mol_type = other RNA
cgttacataacttacggtaaatggcccgcctggctgaccgcccaacgacccccgcccattgacgtcaataatgacgtatgttcccatagtaacgccaatagggactttccattgacgtcaatgggtggagtatttacggtaaactgcccacttggcagtacatcaagtgtatcatatgccaagtacgccccctattgacgtcaatgacggtaaatggcccgcctggcattatgcccagtacatgaccttatgggactttcctacttggcagtacatctacgtattagtcatcgctattaccatggtgatgcggttttggcagtacatcaatgggcgtggatagcggtttgactcacggggatttccaagtctccaccccattgacgtcaatgggagtttgttttggcaccaaaatcaacgggactttccaaaatgtcgtaacaactccgccccattgacgcaaatgggcggtaggcgtgtacggtgggaggtctatataagcagagctggtttagtgaaccgtcagatccgctagcgctaccggactcagatcgccaccatgtacccctacgacgtgccagactacgcccctgcggcaaaaaagaaaaagttggacggcggctctggcggcggaggatctggcggaggtggaagcggaggaccgcctaagaagaagcagaagctggaacggctgaagaaactggacaagcccacactgcacacctgtaacaagaccagcttcgccaaggccttcctgcctaacgagacataccggcagcggctgctggactatatcgccatcattcaccagctggccgaccacgcctctcacgccctgaagttttacatcctgagcacctccaccagcagcttccctgtggtgcacgaggataccatcgaggccatcctgtacctgctgaacaagggcgaagcctggcatcccagaaaagaggccaagaaggcctggcgggattgcctgctgccttacgtgcagagatactgccagatcgtgggcttcattcaccccaacctgagaggcgagcagcagagcatcaactacctgaccgtgtccatgatgaccaacctgaaagtgaacgtgcaagagcacttcatgcagatgctgctgcggtacatcaatctgcgcttcgacgtgaagggccagaagcagagactgcctcctaagagcgacgcccgcaaggcctttttcacccggctgagatacctgaagtccgtgttcctgttcgacgtggtgcccgagctggaattcctggacgatctgacccctctggaaagcgaggtgctggaagagatctggtccctggacctgccttttctgcccaacgatcctctggcctacgccatcgtggccgatcctatgagcttcttcccagcctactgcaagctgagcggcctgtacgagcagtacggcttccagcggtttagcgccattcctctgcggagaagcctgatccagtctcacgtgcggatcgacaccatcatcctgtatcagcacatcctgtgcatcaccagacgggacgccgagacagtggaaaaggacgacctgtggatgagagtgtgcaacctgtgcaccaaagccttccggtccagatgcggcatgcacttcgagggcagcatcacaacagatggcgccagcgtgtccgtgtacctgaaacaccctgaggccgataagtacggcaagagaggcgccagaaagtccgccaatactgtggccgccgaagtgaaggccctgtacgtggaaaacaacctgcctgcctgtagagccgccgagaacgtggtggtcatcgaccccaacaagcgggatatcctgtactgccaggacagcaacggcaccaccttcagatacaccgccaaccagagagccgtggaaaccggcagcagaagattcgccaagcggcgggaagccatgaaggaagaagccggcgttgacctgatcgagagcagaatccctagccacaagaccatgaacctgatggacttcaccagatacctgctcgtgcggagagccgactgggacagacggaaagagttctactctcaccccgctcacacccggtggaagtggcacagcttcatcaaccggcagaagtccgagagcgacctgatcagcaacatgcggaacaaatacggcgagaacttcaccgtggtcatgggcgattggagcgacgctggaagaaaggccagattccagaccagcagcaagaccaaaggctggcggaccctgttcaagcggaaccggatcgattgcttcctgctggacgagtacaagacctccagcgtgtgccctagatgcagcagcagcgagttcgtggaaaagaagttcaagacccggcctcacagcagaccctggcgaagaagagagggcaagatcgagaaggtgcacggcctgctgggctgcaccaatcctaattgtctgcagcaggcctggaccagcggcatgagatactggaaccgggacatgctgagcacatgcaacatgctgctgatcgtgcggtccatgctggatggccatggcagacctgaggtgttctctagatctgtgcctgccgtggcctgactagcataaccccttggggcgcactcctcaggtgcaggctgcctatcagaaggtggtggctggtgtggccaatgccctggctcacaaataccactgagatctttttccctctgccaaaaattatggggacatcatgaagccccttgagcatctgacttctggctaataaaggaaatttattttcattgcaatagtgtgttggaattttttgtgtctctcactcggaaggacatatgggagggcaaatcatttaaaacatcagaatgagtatttggtttagagtttggcaacatatgcccatatgctggctgccatgaacaaaggttggctataaagaggtcatcagtatatgaaacagccccctgctgtccattccttattccatagaaaagccttgacttgaggttagattttttttatattttgttttgtgttatttttttctttaacatccctaaaattttccttacatgttttactagccagatttttcctcctctcctgactactcccagtcatagctgtccctcttctcttatggagatccctcgacctgcagcccaagcttggcgtaatcatggtcatagctgtttcctgtgtgaaattgttatccgctcacaattccacacaacatacgagccggaagcataaagtgtaaagcctggggtgcctaatgagtgagctaactcacattaattgcgttgcgctcactgcccgctttccagtcgggaaacctgtcgtgccagcggatccgcatctcaattagtcagcaaccatagtcccgcccctaactccgcccatcccgcccctaactccgcccagttccgcccattctccgccccatggctgactaattttttttatttatgcagaggccgaggccgcctcggcctctgagctattccagaagtagtgaggaggcttttttggaggcctaggcttttgcaaaaagctaacttgtttattgcagcttataatggttacaaataaagcaatagcatcacaaatttcacaaataaagcatttttttcactgcattctagttgtggtttgtccaaactcatcaatgtatcttatcatgtctggatccgctgcattaatgaatcggccaacgcgcggggagaggcggtttgcgtattgggcgctcttccgcttcctcgctcactgactcgctgcgctcggtcgttcggctgcggcgagcggtatcagctcactcaaaggcggtaatacggttatccacagaatcaggggataacgcaggaaagaacatgtgagcaaaaggccagcaaaaggccaggaaccgtaaaaaggccgcgttgctggcgtttttccataggctccgcccccctgacgagcatcacaaaaatcgacgctcaagtcagaggtggcgaaacccgacaggactataaagataccaggcgtttccccctggaagctccctcgtgcgctctcctgttccgaccctgccgcttaccggatacctgtccgcctttctcccttcgggaagcgtggcgctttctcatagctcacgctgtaggtatctcagttcggtgtaggtcgttcgctccaagctgggctgtgtgcacgaaccccccgttcagcccgaccgctgcgccttatccggtaactatcgtcttgagtccaacccggtaagacacgacttatcgccactggcagcagccactggtaacaggattagcagagcgaggtatgtaggcggtgctacagagttcttgaagtggtggcctaactacggctacactagaagaacagtatttggtatctgcgctctgctgaagccagttaccttcggaaaaagagttggtagctcttgatccggcaaacaaaccaccgctggtagcggtggtttttttgtttgcaagcagcagattacgcgcagaaaaaaaggatctcaagaagatcctttgatcttttctacggggtctgacgctcagtggaacgaaaactcacgttaagggattttggtcatgagattatcaaaaaggatcttcacctagatccttttaaattaaaaatgaagttttaaatcaatctaaagtatatatgagtaaacttggtctgacagttaccaatgcttaatcagtgaggcacctatctcagcgatctgtctatttcgttcatccatagttgcctgactccccgtcgtgtagataactacgatacgggagggcttaccatctggccccagtgctgcaatgataccgcgagacccacgctcaccggctccagatttatcagcaataaaccagccagccggaagggccgagcgcagaagtggtcctgcaactttatccgcctccatccagtctattaattgttgccgggaagctagagtaagtagttcgccagttaatagtttgcgcaacgttgttgccattgctacaggcatcgtggtgtcacgctcgtcgtttggtatggcttcattcagctccggttcccaacgatcaaggcgagttacatgatcccccatgttgtgcaaaaaagcggttagctccttcggtcctccgatcgttgtcagaagtaagttggccgcagtgttatcactcatggttatggcagcactgcataattctcttactgtcatgccatccgtaagatgcttttctgtgactggtgagtactcaaccaagtcattctgagaatagtgtatgcggcgaccgagttgctcttgcccggcgtcaatacgggataataccgcgccacatagcagaactttaaaagtgctcatcattggaaaacgttcttcggggcgaaaactctcaaggatcttaccgctgttgagatccagttcgatgtaacccactcgtgcacccaactgatcttcagcatcttttactttcaccagcgtttctgggtgagcaaaaacaggaaggcaaaatgccgcaaaaaagggaataagggcgacacggaaatgttgaatactcatactcttcctttttcaatattattgaagcatttatcagggttattgtctcatgagcggatacatatttgaatgtatttagaaaaataaacaaataggggttccgcgcacatttccccgaaaagtgccacctgggtcgacattgattattgactagtaatagtaatcaattacggggtcattagttcatagcccatatatggagttccg

SEQ ID NO: 3962 - RNA, 5729 nt, Homo sapiens
  source 1..5729: mol_type = other RNA
cgttacataacttacggtaaatggcccgcctggctgaccgcccaacgacccccgcccattgacgtcaataatgacgtatgttcccatagtaacgccaatagggactttccattgacgtcaatgggtggagtatttacggtaaactgcccacttggcagtacatcaagtgtatcatatgccaagtacgccccctattgacgtcaatgacggtaaatggcccgcctggcattatgcccagtacatgaccttatgggactttcctacttggcagtacatctacgtattagtcatcgctattaccatggtgatgcggttttggcagtacatcaatgggcgtggatagcggtttgactcacggggatttccaagtctccaccccattgacgtcaatgggagtttgttttggcaccaaaatcaacgggactttccaaaatgtcgtaacaactccgccccattgacgcaaatgggcggtaggcgtgtacggtgggaggtctatataagcagagctggtttagtgaaccgtcagatccgctagcgctaccggactcagatcgccaccatgtacccctacgacgtgccagactacgcccctgcggcaaaaaagaaaaagttggacggcggctctggcggcggaggatctggcggaggtggaagcggaggaccgcctaagaagaagcagaagctggaacggctgaagaaactggacaagcccacactgcacacctgtaacaagaccagcttcgccaaggccttcctgcctaacgagacataccggcagcggctgctggactatatcgccatcattcaccagctggccgaccacgcctctcacgccctgaagttttacatcctgagcacctccaccagcagcttccctgtggtgcacgaggataccatcgaggccatcctgtacctgctgaacaagggcgaagcctggcatcccagaaaagaggccaagaaggcctggcgggattgcctgctgccttacgtgcagagatactgccagatcgtgggcttcattcaccccaacctgagaggcgagcagcagagcatcaactacctgaccgtgtccatgatgaccaacctgaaagtgaacgtgcaagagcacttcatgcagatgctgctgcggtacatcaatctgcgcttcgacgtgaagggccagaagcagagactgcctcctaagagcgacgcccgcaaggcctttttcacccggctgagatacctgaagtccgtgttcctgttcgacgtggtgcccgagctggaattcctggacgatctgacccctctggaaagcgaggtgctggaagagatctggtccctggacctgccttttctgcccaacgatcctctggcctacgccatcgtggccgatcctatgagcttcttcccagcctactgcaagctgagcggcctgtacgagcagtacggcttccagcggtttagcgccattcctctgcggagaagcctgatccagtctcacgtgcggatcgacaccatcatcctgtatcagcacatcctgtgcatcaccagacgggacgccgagacagtggaaaagcgcgacctgtggatgagagtgtgcaacctgcggaccaaagccttccggtccagatgcggcatgcacttcgagggcagcatcacaacagatggcgccagcgtgtccgtgtacctgaaacaccctgaggccgataagtacggcaagagaggcgccagaaagtccgccaatactgtggccgccgaagtgaaggccctgtacgtggaaaacaacctgcctgcctgtagagccgccgagaacgtggtggtcatcgaccccaacaagcgggatatcctgtactgccaggacagcaacggcaccaccttcagatacaccgccaaccagagagccgtggaaaccggcagcagaagattcgccaagcggcgggaagccatgaaggaagaagccggcgttgacctgatcgagagcagaatccctagccacaagaccatgaacctgatggacttcaccagatacctgctcgtgcggagagccgactgggacagacggaaagagttctactctcaccccgctcacacccggtggaagtggcacagcttcatcaaccggcagaagtccgagagcgacctgatcagcaacatgcggaacaaatacggcgagaacttcaccgtggtcatgggcgattggagcgacgctggaagaaccgccagattccagaccagcagcaagaccaaaggctggcggaccctgttcaagcggaaccggatcgattgcttcctgctggacgagtacaagacctccagcgtgtgccctagatgcagcagcagcgagttcgtggaaaagaagttcaagacccggcctcacagcagaccctggcgaagaagagagggcaagatcgagaaggtgcacggcctgctgggctgcaccaatcctaattgtctgcagcaggcctggaccagcggcatgagatactggaaccgggacatgctgagcacatgcaacatgctgctgatcgtgcggtccatgctggatggccatggcagacctgaggtgttctctagatctgtgcctgccgtggcctgactagcataaccccttggggcgcactcctcaggtgcaggctgcctatcagaaggtggtggctggtgtggccaatgccctggctcacaaataccactgagatctttttccctctgccaaaaattatggggacatcatgaagccccttgagcatctgacttctggctaataaaggaaatttattttcattgcaatagtgtgttggaattttttgtgtctctcactcggaaggacatatgggagggcaaatcatttaaaacatcagaatgagtatttggtttagagtttggcaacatatgcccatatgctggctgccatgaacaaaggttggctataaagaggtcatcagtatatgaaacagccccctgctgtccattccttattccatagaaaagccttgacttgaggttagattttttttatattttgttttgtgttatttttttctttaacatccctaaaattttccttacatgttttactagccagatttttcctcctctcctgactactcccagtcatagctgtccctcttctcttatggagatccctcgacctgcagcccaagcttggcgtaatcatggtcatagctgtttcctgtgtgaaattgttatccgctcacaattccacacaacatacgagccggaagcataaagtgtaaagcctggggtgcctaatgagtgagctaactcacattaattgcgttgcgctcactgcccgctttccagtcgggaaacctgtcgtgccagcggatccgcatctcaattagtcagcaaccatagtcccgcccctaactccgcccatcccgcccctaactccgcccagttccgcccattctccgccccatggctgactaattttttttatttatgcagaggccgaggccgcctcggcctctgagctattccagaagtagtgaggaggcttttttggaggcctaggcttttgcaaaaagctaacttgtttattgcagcttataatggttacaaataaagcaatagcatcacaaatttcacaaataaagcatttttttcactgcattctagttgtggtttgtccaaactcatcaatgtatcttatcatgtctggatccgctgcattaatgaatcggccaacgcgcggggagaggcggtttgcgtattgggcgctcttccgcttcctcgctcactgactcgctgcgctcggtcgttcggctgcggcgagcggtatcagctcactcaaaggcggtaatacggttatccacagaatcaggggataacgcaggaaagaacatgtgagcaaaaggccagcaaaaggccaggaaccgtaaaaaggccgcgttgctggcgtttttccataggctccgcccccctgacgagcatcacaaaaatcgacgctcaagtcagaggtggcgaaacccgacaggactataaagataccaggcgtttccccctggaagctccctcgtgcgctctcctgttccgaccctgccgcttaccggatacctgtccgcctttctcccttcgggaagcgtggcgctttctcatagctcacgctgtaggtatctcagttcggtgtaggtcgttcgctccaagctgggctgtgtgcacgaaccccccgttcagcccgaccgctgcgccttatccggtaactatcgtcttgagtccaacccggtaagacacgacttatcgccactggcagcagccactggtaacaggattagcagagcgaggtatgtaggcggtgctacagagttcttgaagtggtggcctaactacggctacactagaagaacagtatttggtatctgcgctctgctgaagccagttaccttcggaaaaagagttggtagctcttgatccggcaaacaaaccaccgctggtagcggtggtttttttgtttgcaagcagcagattacgcgcagaaaaaaaggatctcaagaagatcctttgatcttttctacggggtctgacgctcagtggaacgaaaactcacgttaagggattttggtcatgagattatcaaaaaggatcttcacctagatccttttaaattaaaaatgaagttttaaatcaatctaaagtatatatgagtaaacttggtctgacagttaccaatgcttaatcagtgaggcacctatctcagcgatctgtctatttcgttcatccatagttgcctgactccccgtcgtgtagataactacgatacgggagggcttaccatctggccccagtgctgcaatgataccgcgagacccacgctcaccggctccagatttatcagcaataaaccagccagccggaagggccgagcgcagaagtggtcctgcaactttatccgcctccatccagtctattaattgttgccgggaagctagagtaagtagttcgccagttaatagtttgcgcaacgttgttgccattgctacaggcatcgtggtgtcacgctcgtcgtttggtatggcttcattcagctccggttcccaacgatcaaggcgagttacatgatcccccatgttgtgcaaaaaagcggttagctccttcggtcctccgatcgttgtcagaagtaagttggccgcagtgttatcactcatggttatggcagcactgcataattctcttactgtcatgccatccgtaagatgcttttctgtgactggtgagtactcaaccaagtcattctgagaatagtgtatgcggcgaccgagttgctcttgcccggcgtcaatacgggataataccgcgccacatagcagaactttaaaagtgctcatcattggaaaacgttcttcggggcgaaaactctcaaggatcttaccgctgttgagatccagttcgatgtaacccactcgtgcacccaactgatcttcagcatcttttactttcaccagcgtttctgggtgagcaaaaacaggaaggcaaaatgccgcaaaaaagggaataagggcgacacggaaatgttgaatactcatactcttcctttttcaatattattgaagcatttatcagggttattgtctcatgagcggatacatatttgaatgtatttagaaaaataaacaaataggggttccgcgcacatttccccgaaaagtgccacctgggtcgacattgattattgactagtaatagtaatcaattacggggtcattagttcatagcccatatatggagttccg

SEQ ID NO: 3963 - RNA, 5729 nt, Homo sapiens
  source 1..5729: mol_type = other RNA
cgttacataacttacggtaaatggcccgcctggctgaccgcccaacgacccccgcccattgacgtcaataatgacgtatgttcccatagtaacgccaatagggactttccattgacgtcaatgggtggagtatttacggtaaactgcccacttggcagtacatcaagtgtatcatatgccaagtacgccccctattgacgtcaatgacggtaaatggcccgcctggcattatgcccagtacatgaccttatgggactttcctacttggcagtacatctacgtattagtcatcgctattaccatggtgatgcggttttggcagtacatcaatgggcgtggatagcggtttgactcacggggatttccaagtctccaccccattgacgtcaatgggagtttgttttggcaccaaaatcaacgggactttccaaaatgtcgtaacaactccgccccattgacgcaaatgggcggtaggcgtgtacggtgggaggtctatataagcagagctggtttagtgaaccgtcagatccgctagcgctaccggactcagatcgccaccatgtacccctacgacgtgccagactacgcccctgcggcaaaaaagaaaaagttggacggcggctctggcggcggaggatctggcggaggtggaagcggaggaccgcctaagaagaagcagaagctggaacggctgaagaaactggacaagcccacactgcacacctgtaacaagaccagcttcgccaaggccttcctgcctaacgagacataccggcagcggctgctggactatatcgccatcattcaccagctggccgaccacgcctctcacgccctgaagttttacatcctgagcacctccaccagcagcttccctgtggtgcacgaggataccatcgaggccatcctgtacctgctgaacaagggcgaagcctggcatcccagaaaagaggccaagaaggcctggcgggattgcctgctgccttacgtgcagagatactgccagatcgtgggcttcattcaccccaacctgagaggcgagcagcagagcatcaactacctgaccgtgtccatgatgaccaacctgaaagtgaacgtgcaagagcacttcatgcagatgctgctgcggtacatcaatctgcgcttcgacgtgaagggccagaagcagagactgcctcctaagagcgacgcccgcaaggcctttttcacccggctgagatacctgaagtccgtgttcctgttcgacgtggtgcccgagctggaattcctggacgatctgacccctctggaaagcgaggtgctggaagagatctggtccctggacctgccttttctgcccaacgatcctctggcctacgccatcgtggccgatcctatgagcttcttcccagcctactgcaagctgagcggcctgtacgagcagtacggcttccagcggtttagcgccattcctctgcggagaagcctgatccagtctcacgtgcggatcgacaccatcatcctgtatcagcacatcctgtgcatcaccagacgggacgccgagacagtggaaaagcgcgacctgtggatgagagtgtgcaacctgtgcaccaaagccttccggtccagatgcggcatgcacttcgagggcagcatcacaacagatggcgccagcgtgtccgtgtacctgaaacaccctgaggccgataagtacggcaagagaggcgccagaaagtccgccaatactgtggccgccgaagtgaaggccctgtacgtggaaaacaacctgcctgcctgtagagccgccgagaacgtggtggtcatcgaccccaacaagcgggatatcctgtactgccaggacagcaacggcaccaccttcagatacaccgccaaccagagagccgtggaaaccggcagcagaagattcgccaagcggcgggaagccatgaaggaagaagccggcgttgacctgatcgagagcagaatccctagccacaagaccatgaacctgatggacttcaccagatacctgctcgtgcggagagccgactgggacagacggaaagagttctactctcaccccgctcacacccggtggaagtggcacagcttcatcaaccggcagaagtccgagagcaagctgatcagcaacatgcggaacaaatacggcgagaacttcaccgtggtcatgggcgattggagcgacgctggaagaaccgccagattccagaccagcagcaagaccaaaggctggcggaccctgttcaagcggaaccggatcgattgcttcctgctggacgagtacaagacctccagcgtgtgccctagatgcagcagcagcgagttcgtggaaaagaagttcaagacccggcctcacagcagaccctggcgaagaagagagggcaagatcgagaaggtgcacggcctgctgggctgcaccaatcctaattgtctgcagcaggcctggaccagcggcatgagatactggaaccgggacatgctgagcacatgcaacatgctgctgatcgtgcggtccatgctggatggccatggcagacctgaggtgttctctagatctgtgcctgccgtggcctgactagcataaccccttggggcgcactcctcaggtgcaggctgcctatcagaaggtggtggctggtgtggccaatgccctggctcacaaataccactgagatctttttccctctgccaaaaattatggggacatcatgaagccccttgagcatctgacttctggctaataaaggaaatttattttcattgcaatagtgtgttggaattttttgtgtctctcactcggaaggacatatgggagggcaaatcatttaaaacatcagaatgagtatttggtttagagtttggcaacatatgcccatatgctggctgccatgaacaaaggttggctataaagaggtcatcagtatatgaaacagccccctgctgtccattccttattccatagaaaagccttgacttgaggttagattttttttatattttgttttgtgttatttttttctttaacatccctaaaattttccttacatgttttactagccagatttttcctcctctcctgactactcccagtcatagctgtccctcttctcttatggagatccctcgacctgcagcccaagcttggcgtaatcatggtcatagctgtttcctgtgtgaaattgttatccgctcacaattccacacaacatacgagccggaagcataaagtgtaaagcctggggtgcctaatgagtgagctaactcacattaattgcgttgcgctcactgcccgctttccagtcgggaaacctgtcgtgccagcggatccgcatctcaattagtcagcaaccatagtcccgcccctaactccgcccatcccgcccctaactccgcccagttccgcccattctccgccccatggctgactaattttttttatttatgcagaggccgaggccgcctcggcctctgagctattccagaagtagtgaggaggcttttttggaggcctaggcttttgcaaaaagctaacttgtttattgcagcttataatggttacaaataaagcaatagcatcacaaatttcacaaataaagcatttttttcactgcattctagttgtggtttgtccaaactcatcaatgtatcttatcatgtctggatccgctgcattaatgaatcggccaacgcgcggggagaggcggtttgcgtattgggcgctcttccgcttcctcgctcactgactcgctgcgctcggtcgttcggctgcggcgagcggtatcagctcactcaaaggcggtaatacggttatccacagaatcaggggataacgcaggaaagaacatgtgagcaaaaggccagcaaaaggccaggaaccgtaaaaaggccgcgttgctggcgtttttccataggctccgcccccctgacgagcatcacaaaaatcgacgctcaagtcagaggtggcgaaacccgacaggactataaagataccaggcgtttccccctggaagctccctcgtgcgctctcctgttccgaccctgccgcttaccggatacctgtccgcctttctcccttcgggaagcgtggcgctttctcatagctcacgctgtaggtatctcagttcggtgtaggtcgttcgctccaagctgggctgtgtgcacgaaccccccgttcagcccgaccgctgcgccttatccggtaactatcgtcttgagtccaacccggtaagacacgacttatcgccactggcagcagccactggtaacaggattagcagagcgaggtatgtaggcggtgctacagagttcttgaagtggtggcctaactacggctacactagaagaacagtatttggtatctgcgctctgctgaagccagttaccttcggaaaaagagttggtagctcttgatccggcaaacaaaccaccgctggtagcggtggtttttttgtttgcaagcagcagattacgcgcagaaaaaaaggatctcaagaagatcctttgatcttttctacggggtctgacgctcagtggaacgaaaactcacgttaagggattttggtcatgagattatcaaaaaggatcttcacctagatccttttaaattaaaaatgaagttttaaatcaatctaaagtatatatgagtaaacttggtctgacagttaccaatgcttaatcagtgaggcacctatctcagcgatctgtctatttcgttcatccatagttgcctgactccccgtcgtgtagataactacgatacgggagggcttaccatctggccccagtgctgcaatgataccgcgagacccacgctcaccggctccagatttatcagcaataaaccagccagccggaagggccgagcgcagaagtggtcctgcaactttatccgcctccatccagtctattaattgttgccgggaagctagagtaagtagttcgccagttaatagtttgcgcaacgttgttgccattgctacaggcatcgtggtgtcacgctcgtcgtttggtatggcttcattcagctccggttcccaacgatcaaggcgagttacatgatcccccatgttgtgcaaaaaagcggttagctccttcggtcctccgatcgttgtcagaagtaagttggccgcagtgttatcactcatggttatggcagcactgcataattctcttactgtcatgccatccgtaagatgcttttctgtgactggtgagtactcaaccaagtcattctgagaatagtgtatgcggcgaccgagttgctcttgcccggcgtcaatacgggataataccgcgccacatagcagaactttaaaagtgctcatcattggaaaacgttcttcggggcgaaaactctcaaggatcttaccgctgttgagatccagttcgatgtaacccactcgtgcacccaactgatcttcagcatcttttactttcaccagcgtttctgggtgagcaaaaacaggaaggcaaaatgccgcaaaaaagggaataagggcgacacggaaatgttgaatactcatactcttcctttttcaatattattgaagcatttatcagggttattgtctcatgagcggatacatatttgaatgtatttagaaaaataaacaaataggggttccgcgcacatttccccgaaaagtgccacctgggtcgacattgattattgactagtaatagtaatcaattacggggtcattagttcatagcccatatatggagttccg

SEQ ID NO: 3964 - RNA, 5729 nt, Homo sapiens
  source 1..5729: mol_type = other RNA
cgttacataacttacggtaaatggcccgcctggctgaccgcccaacgacccccgcccattgacgtcaataatgacgtatgttcccatagtaacgccaatagggactttccattgacgtcaatgggtggagtatttacggtaaactgcccacttggcagtacatcaagtgtatcatatgccaagtacgccccctattgacgtcaatgacggtaaatggcccgcctggcattatgcccagtacatgaccttatgggactttcctacttggcagtacatctacgtattagtcatcgctattaccatggtgatgcggttttggcagtacatcaatgggcgtggatagcggtttgactcacggggatttccaagtctccaccccattgacgtcaatgggagtttgttttggcaccaaaatcaacgggactttccaaaatgtcgtaacaactccgccccattgacgcaaatgggcggtaggcgtgtacggtgggaggtctatataagcagagctggtttagtgaaccgtcagatccgctagcgctaccggactcagatcgccaccatgtacccctacgacgtgccagactacgcccctgcggcaaaaaagaaaaagttggacggcggctctggcggcggaggatctggcggaggtggaagcggaggaccgcctaagaagaagcagaagctggaacggctgaagaaactggacaagcccacactgcacacctgtaacaagaccagcttcgccaaggccttcctgcctaacgagacataccggcagcggctgctggactatatcgccatcattcaccagctggccgaccacgcctctcacgccctgaagttttacatcctgagcacctccaccagcagcttccctgtggtgcacgaggataccatcgaggccatcctgtacctgctgaacaagggcgaagcctggcatcccagaaaagaggccaagaaggcctggcgggattgcctgctgccttacgtgcagagatactgccagatcgtgggcttcattcaccccaacctgagaggcgagcagcagagcatcaactacctgaccgtgtccatgatgaccaacctgaaagtgaacgtgcaagagcacttcatgcagatgctgctgcggtacatcaatctgcgcttcgacgtgaagggccagaagcagagactgcctcctaagagcgacgcccgcaaggcctttttcacccggctgagatacctgaagtccgtgttcctgttcgacgtggtgcccgagctggaattcctggacgatctgacccctctggaaagcgaggtgctggaagagatctggtccctggacctgccttttctgcccaacgatcctctggcctacgccatcgtggccgatcctatgagcttcttcccagcctactgcaagctgagcggcctgtacgagcagtacggcttccagcggtttagcgccattcctctgcggagaagcctgatccagtctcacgtgcggatcgacaccatcatcctgtatcagcacatcctgtgcatcaccagacgggacgccgagacagtggaaaagcgcgacctgtggatgagagtgtgcaacctgtgcaccaaagccttccggtccagatgcggcatgcacttcgagggcagcatcacaacagatggcgccagcgtgtccgtgtacctgaaacaccctgaggccgataagtacggcaagagaggcgccagaaagtccgccaatactgtggccgccgaagtgaaggccctgtacgtggaaaacaacctgcctgcctgtagagccgccgagaacgtggtggtcatcgaccccaacaagcgggatatcctgtactgccaggacagcaacggcaccaccttcagatacaccgccaaccagagagccgtggaaaccggcagcagaagattcgccaagcggcgggaagccatgaaggaagaagccggcgttgacctgatcgagagcagaatccctagccacaagaccatgaacctgatggacttcaccagatacctgctcgtgcggagagccgactgggacagacggaaagagttctactctcaccccgctcacacccggtggaagtggcacagcttcatcaaccggcagaagtccgagagcgacctgatcagcaacatgcggaacaaatacggccgcaacttcaccgtggtcatgggcgattggagcgacgctggaagaaccgccagattccagaccagcagcaagaccaaaggctggcggaccctgttcaagcggaaccggatcgattgcttcctgctggacgagtacaagacctccagcgtgtgccctagatgcagcagcagcgagttcgtggaaaagaagttcaagacccggcctcacagcagaccctggcgaagaagagagggcaagatcgagaaggtgcacggcctgctgggctgcaccaatcctaattgtctgcagcaggcctggaccagcggcatgagatactggaaccgggacatgctgagcacatgcaacatgctgctgatcgtgcggtccatgctggatggccatggcagacctgaggtgttctctagatctgtgcctgccgtggcctgactagcataaccccttggggcgcactcctcaggtgcaggctgcctatcagaaggtggtggctggtgtggccaatgccctggctcacaaataccactgagatctttttccctctgccaaaaattatggggacatcatgaagccccttgagcatctgacttctggctaataaaggaaatttattttcattgcaatagtgtgttggaattttttgtgtctctcactcggaaggacatatgggagggcaaatcatttaaaacatcagaatgagtatttggtttagagtttggcaacatatgcccatatgctggctgccatgaacaaaggttggctataaagaggtcatcagtatatgaaacagccccctgctgtccattccttattccatagaaaagccttgacttgaggttagattttttttatattttgttttgtgttatttttttctttaacatccctaaaattttccttacatgttttactagccagatttttcctcctctcctgactactcccagtcatagctgtccctcttctcttatggagatccctcgacctgcagcccaagcttggcgtaatcatggtcatagctgtttcctgtgtgaaattgttatccgctcacaattccacacaacatacgagccggaagcataaagtgtaaagcctggggtgcctaatgagtgagctaactcacattaattgcgttgcgctcactgcccgctttccagtcgggaaacctgtcgtgccagcggatccgcatctcaattagtcagcaaccatagtcccgcccctaactccgcccatcccgcccctaactccgcccagttccgcccattctccgccccatggctgactaattttttttatttatgcagaggccgaggccgcctcggcctctgagctattccagaagtagtgaggaggcttttttggaggcctaggcttttgcaaaaagctaacttgtttattgcagcttataatggttacaaataaagcaatagcatcacaaatttcacaaataaagcatttttttcactgcattctagttgtggtttgtccaaactcatcaatgtatcttatcatgtctggatccgctgcattaatgaatcggccaacgcgcggggagaggcggtttgcgtattgggcgctcttccgcttcctcgctcactgactcgctgcgctcggtcgttcggctgcggcgagcggtatcagctcactcaaaggcggtaatacggttatccacagaatcaggggataacgcaggaaagaacatgtgagcaaaaggccagcaaaaggccaggaaccgtaaaaaggccgcgttgctggcgtttttccataggctccgcccccctgacgagcatcacaaaaatcgacgctcaagtcagaggtggcgaaacccgacaggactataaagataccaggcgtttccccctggaagctccctcgtgcgctctcctgttccgaccctgccgcttaccggatacctgtccgcctttctcccttcgggaagcgtggcgctttctcatagctcacgctgtaggtatctcagttcggtgtaggtcgttcgctccaagctgggctgtgtgcacgaaccccccgttcagcccgaccgctgcgccttatccggtaactatcgtcttgagtccaacccggtaagacacgacttatcgccactggcagcagccactggtaacaggattagcagagcgaggtatgtaggcggtgctacagagttcttgaagtggtggcctaactacggctacactagaagaacagtatttggtatctgcgctctgctgaagccagttaccttcggaaaaagagttggtagctcttgatccggcaaacaaaccaccgctggtagcggtggtttttttgtttgcaagcagcagattacgcgcagaaaaaaaggatctcaagaagatcctttgatcttttctacggggtctgacgctcagtggaacgaaaactcacgttaagggattttggtcatgagattatcaaaaaggatcttcacctagatccttttaaattaaaaatgaagttttaaatcaatctaaagtatatatgagtaaacttggtctgacagttaccaatgcttaatcagtgaggcacctatctcagcgatctgtctatttcgttcatccatagttgcctgactccccgtcgtgtagataactacgatacgggagggcttaccatctggccccagtgctgcaatgataccgcgagacccacgctcaccggctccagatttatcagcaataaaccagccagccggaagggccgagcgcagaagtggtcctgcaactttatccgcctccatccagtctattaattgttgccgggaagctagagtaagtagttcgccagttaatagtttgcgcaacgttgttgccattgctacaggcatcgtggtgtcacgctcgtcgtttggtatggcttcattcagctccggttcccaacgatcaaggcgagttacatgatcccccatgttgtgcaaaaaagcggttagctccttcggtcctccgatcgttgtcagaagtaagttggccgcagtgttatcactcatggttatggcagcactgcataattctcttactgtcatgccatccgtaagatgcttttctgtgactggtgagtactcaaccaagtcattctgagaatagtgtatgcggcgaccgagttgctcttgcccggcgtcaatacgggataataccgcgccacatagcagaactttaaaagtgctcatcattggaaaacgttcttcggggcgaaaactctcaaggatcttaccgctgttgagatccagttcgatgtaacccactcgtgcacccaactgatcttcagcatcttttactttcaccagcgtttctgggtgagcaaaaacaggaaggcaaaatgccgcaaaaaagggaataagggcgacacggaaatgttgaatactcatactcttcctttttcaatattattgaagcatttatcagggttattgtctcatgagcggatacatatttgaatgtatttagaaaaataaacaaataggggttccgcgcacatttccccgaaaagtgccacctgggtcgacattgattattgactagtaatagtaatcaattacggggtcattagttcatagcccatatatggagttccg

SEQ ID NO: 3965 - RNA, 5729 nt, Homo sapiens
  source 1..5729: mol_type = other RNA
cgttacataacttacggtaaatggcccgcctggctgaccgcccaacgacccccgcccattgacgtcaataatgacgtatgttcccatagtaacgccaatagggactttccattgacgtcaatgggtggagtatttacggtaaactgcccacttggcagtacatcaagtgtatcatatgccaagtacgccccctattgacgtcaatgacggtaaatggcccgcctggcattatgcccagtacatgaccttatgggactttcctacttggcagtacatctacgtattagtcatcgctattaccatggtgatgcggttttggcagtacatcaatgggcgtggatagcggtttgactcacggggatttccaagtctccaccccattgacgtcaatgggagtttgttttggcaccaaaatcaacgggactttccaaaatgtcgtaacaactccgccccattgacgcaaatgggcggtaggcgtgtacggtgggaggtctatataagcagagctggtttagtgaaccgtcagatccgctagcgctaccggactcagatcgccaccatgtacccctacgacgtgccagactacgcccctgcggcaaaaaagaaaaagttggacggcggctctggcggcggaggatctggcggaggtggaagcggaggaccgcctaagaagaagcagaagctggaacggctgaagaaactggacaagcccacactgcacacctgtaacaagaccagcttcgccaaggccttcctgcctaacgagacataccggcagcggctgctggactatatcgccatcattcaccagctggccgaccacgcctctcacgccctgaagttttacatcctgagcacctccaccagcagcttccctgtggtgcacgaggataccatcgaggccatcctgtacctgctgaacaagggcgaagcctggcatcccagaaaagaggccaagaaggcctggcgggattgcctgctgccttacgtgcagagatactgccagatcgtgggcttcattcaccccaacctgagaggcgagcagcagagcatcaactacctgaccgtgtccatgatgaccaacctgaaagtgaacgtgcaagagcacttcatgcagatgctgctgcggtacatcaatctgcgcttcgacgtgaagggccagaagcagagactgcctcctaagagcgacgcccgcaaggcctttttcacccggctgagatacctgaagtccgtgttcctgttcgacgtggtgcccgagctggaattcctggacgatctgacccctctggaaagcgaggtgctggaagagatctggtccctggacctgccttttctgcccaacgatcctctggcctacgccatcgtggccgatcctatgagcttcttcccagcctactgcaagctgagcggcctgtacgagcagtacggcttccagcggtttagcgccattcctctgcggagaagcctgatccagtctcacgtgcggatcgacaccatcatcctgtatcagcacatcctgtgcatcaccagacgggacgccgagacagtggaaaagcgcgacctgtggatgagagtgtgcaacctgtgcaccaaagccttccggtccagatgcggcatgcacttcgagggcagcatcacaacagatggcgccagcgtgtccgtgtacctgaaacaccctgaggccgataagtacggcaagagaggcgccagaaagtccgccaatactgtggccgccgaagtgaaggccctgtacgtggaaaacaacctgcctgcctgtagagccgccgagaacgtggtggtcatcgaccccaacaagcgggatatcctgtactgccaggacagcaacggcaccaccttcagatacaccgccaaccagagagccgtggaaaccggcagcagaagattcgccaagcggcgggaagccatgaaggaagaagccggcgttgacctgatcgagagcagaatccctagccacaagaccatgaacctgatggacttcaccagatacctgctcgtgcggagagccgactgggacagacggaaagagttctactctcaccccgctcacacccggtggaagtggcacagcttcatcaaccggcagaagtccgagagcgacctgatcagcaacatgcggaacaaatacggcgagaacttcaccgtggtcatgggcgattggagcgacgctggaagaaaggccagattccagaccagcagcaagaccaaaggctggcggaccctgttcaagcggaaccggatcgattgcttcctgctggacgagtacaagacctccagcgtgtgccctagatgcagcagcagcgagttcgtggaaaagaagttcaagacccggcctcacagcagaccctggcgaagaagagagggcaagatcgagaaggtgcacggcctgctgggctgcaccaatcctaattgtctgcagcaggcctggaccagcggcatgagatactggaaccgggacatgctgagcacatgcaacatgctgctgatcgtgcggtccatgctggatggccatggcagacctgaggtgttctctagatctgtgcctgccgtggcctgactagcataaccccttggggcgcactcctcaggtgcaggctgcctatcagaaggtggtggctggtgtggccaatgccctggctcacaaataccactgagatctttttccctctgccaaaaattatggggacatcatgaagccccttgagcatctgacttctggctaataaaggaaatttattttcattgcaatagtgtgttggaattttttgtgtctctcactcggaaggacatatgggagggcaaatcatttaaaacatcagaatgagtatttggtttagagtttggcaacatatgcccatatgctggctgccatgaacaaaggttggctataaagaggtcatcagtatatgaaacagccccctgctgtccattccttattccatagaaaagccttgacttgaggttagattttttttatattttgttttgtgttatttttttctttaacatccctaaaattttccttacatgttttactagccagatttttcctcctctcctgactactcccagtcatagctgtccctcttctcttatggagatccctcgacctgcagcccaagcttggcgtaatcatggtcatagctgtttcctgtgtgaaattgttatccgctcacaattccacacaacatacgagccggaagcataaagtgtaaagcctggggtgcctaatgagtgagctaactcacattaattgcgttgcgctcactgcccgctttccagtcgggaaacctgtcgtgccagcggatccgcatctcaattagtcagcaaccatagtcccgcccctaactccgcccatcccgcccctaactccgcccagttccgcccattctccgccccatggctgactaattttttttatttatgcagaggccgaggccgcctcggcctctgagctattccagaagtagtgaggaggcttttttggaggcctaggcttttgcaaaaagctaacttgtttattgcagcttataatggttacaaataaagcaatagcatcacaaatttcacaaataaagcatttttttcactgcattctagttgtggtttgtccaaactcatcaatgtatcttatcatgtctggatccgctgcattaatgaatcggccaacgcgcggggagaggcggtttgcgtattgggcgctcttccgcttcctcgctcactgactcgctgcgctcggtcgttcggctgcggcgagcggtatcagctcactcaaaggcggtaatacggttatccacagaatcaggggataacgcaggaaagaacatgtgagcaaaaggccagcaaaaggccaggaaccgtaaaaaggccgcgttgctggcgtttttccataggctccgcccccctgacgagcatcacaaaaatcgacgctcaagtcagaggtggcgaaacccgacaggactataaagataccaggcgtttccccctggaagctccctcgtgcgctctcctgttccgaccctgccgcttaccggatacctgtccgcctttctcccttcgggaagcgtggcgctttctcatagctcacgctgtaggtatctcagttcggtgtaggtcgttcgctccaagctgggctgtgtgcacgaaccccccgttcagcccgaccgctgcgccttatccggtaactatcgtcttgagtccaacccggtaagacacgacttatcgccactggcagcagccactggtaacaggattagcagagcgaggtatgtaggcggtgctacagagttcttgaagtggtggcctaactacggctacactagaagaacagtatttggtatctgcgctctgctgaagccagttaccttcggaaaaagagttggtagctcttgatccggcaaacaaaccaccgctggtagcggtggtttttttgtttgcaagcagcagattacgcgcagaaaaaaaggatctcaagaagatcctttgatcttttctacggggtctgacgctcagtggaacgaaaactcacgttaagggattttggtcatgagattatcaaaaaggatcttcacctagatccttttaaattaaaaatgaagttttaaatcaatctaaagtatatatgagtaaacttggtctgacagttaccaatgcttaatcagtgaggcacctatctcagcgatctgtctatttcgttcatccatagttgcctgactccccgtcgtgtagataactacgatacgggagggcttaccatctggccccagtgctgcaatgataccgcgagacccacgctcaccggctccagatttatcagcaataaaccagccagccggaagggccgagcgcagaagtggtcctgcaactttatccgcctccatccagtctattaattgttgccgggaagctagagtaagtagttcgccagttaatagtttgcgcaacgttgttgccattgctacaggcatcgtggtgtcacgctcgtcgtttggtatggcttcattcagctccggttcccaacgatcaaggcgagttacatgatcccccatgttgtgcaaaaaagcggttagctccttcggtcctccgatcgttgtcagaagtaagttggccgcagtgttatcactcatggttatggcagcactgcataattctcttactgtcatgccatccgtaagatgcttttctgtgactggtgagtactcaaccaagtcattctgagaatagtgtatgcggcgaccgagttgctcttgcccggcgtcaatacgggataataccgcgccacatagcagaactttaaaagtgctcatcattggaaaacgttcttcggggcgaaaactctcaaggatcttaccgctgttgagatccagttcgatgtaacccactcgtgcacccaactgatcttcagcatcttttactttcaccagcgtttctgggtgagcaaaaacaggaaggcaaaatgccgcaaaaaagggaataagggcgacacggaaatgttgaatactcatactcttcctttttcaatattattgaagcatttatcagggttattgtctcatgagcggatacatatttgaatgtatttagaaaaataaacaaataggggttccgcgcacatttccccgaaaagtgccacctgggtcgacattgattattgactagtaatagtaatcaattacggggtcattagttcatagcccatatatggagttccg

SEQ ID NO: 3966 - RNA, 5729 nt, Homo sapiens
  source 1..5729: mol_type = other RNA
cgttacataacttacggtaaatggcccgcctggctgaccgcccaacgacccccgcccattgacgtcaataatgacgtatgttcccatagtaacgccaatagggactttccattgacgtcaatgggtggagtatttacggtaaactgcccacttggcagtacatcaagtgtatcatatgccaagtacgccccctattgacgtcaatgacggtaaatggcccgcctggcattatgcccagtacatgaccttatgggactttcctacttggcagtacatctacgtattagtcatcgctattaccatggtgatgcggttttggcagtacatcaatgggcgtggatagcggtttgactcacggggatttccaagtctccaccccattgacgtcaatgggagtttgttttggcaccaaaatcaacgggactttccaaaatgtcgtaacaactccgccccattgacgcaaatgggcggtaggcgtgtacggtgggaggtctatataagcagagctggtttagtgaaccgtcagatccgctagcgctaccggactcagatcgccaccatgtacccctacgacgtgccagactacgcccctgcggcaaaaaagaaaaagttggacggcggctctggcggcggaggatctggcggaggtggaagcggaggaccgcctaagaagaagcagaagctggaacggctgaagaaactggacaagcccacactgcacacctgtaacaagaccagcttcgccaaggccttcctgcctaacgagacataccggcagcggctgctggactatatcgccatcattcaccagctggccgaccacgcctctcacgccctgaagttttacatcctgagcacctccaccagcagcttccctgtggtgcacgaggataccatcgaggccatcctgtacctgctgaacaagggcgaagcctggcatcccagaaaagaggccaagaaggcctggcgggattgcctgctgccttacgtgcagagatactgccagatcgtgggcttcattcaccccaacctgagaggcgagcagcagagcatcaactacctgaccgtgtccatgatgaccaacctgaaagtgaacgtgcaagagcacttcatgcagatgctgctgcggtacatcaatctgcgcttcgacgtgaagggccagaagcagagactgcctcctaagagcgacgcccgcaaggcctttttcacccggctgagatacctgaagtccgtgttcctgttcgacgtggtgcccgagctggaattcctggacgatctgacccctctggaaagcgaggtgctggaagagatctggtccctggacctgccttttctgcccaacgatcctctggcctacgccatcgtggccgatcctatgagcttcttcccagcctactgcaagctgagcggcctgtacgagcagtacggcttccagcggtttagcgccattcctctgcggagaagcctgatccagtctcacgtgcggatcgacaccatcatcctgtatcagcacatcctgtgcatcaccagacgggacgccgagacagtggaaaaggacgacctgtggatgagagtgtgcaacctgcggaccaaagccttccggtccagatgcggcatgcacttcgagggcagcatcacaacagatggcgccagcgtgtccgtgtacctgaaacaccctgaggccgataagtacggcaagagaggcgccagaaagtccgccaatactgtggccgccgaagtgaaggccctgtacgtggaaaacaacctgcctgcctgtagagccgccgagaacgtggtggtcatcgaccccaacaagcgggatatcctgtactgccaggacagcaacggcaccaccttcagatacaccgccaaccagagagccgtggaaaccggcagcagaagattcgccaagcggcgggaagccatgaaggaagaagccggcgttgacctgatcgagagcagaatccctagccacaagaccatgaacctgatggacttcaccagatacctgctcgtgcggagagccgactgggacagacggaaagagttctactctcaccccgctcacacccggtggaagtggcacagcttcatcaaccggcagaagtccgagagcaagctgatcagcaacatgcggaacaaatacggcgagaacttcaccgtggtcatgggcgattggagcgacgctggaagaaccgccagattccagaccagcagcaagaccaaaggctggcggaccctgttcaagcggaaccggatcgattgcttcctgctggacgagtacaagacctccagcgtgtgccctagatgcagcagcagcgagttcgtggaaaagaagttcaagacccggcctcacagcagaccctggcgaagaagagagggcaagatcgagaaggtgcacggcctgctgggctgcaccaatcctaattgtctgcagcaggcctggaccagcggcatgagatactggaaccgggacatgctgagcacatgcaacatgctgctgatcgtgcggtccatgctggatggccatggcagacctgaggtgttctctagatctgtgcctgccgtggcctgactagcataaccccttggggcgcactcctcaggtgcaggctgcctatcagaaggtggtggctggtgtggccaatgccctggctcacaaataccactgagatctttttccctctgccaaaaattatggggacatcatgaagccccttgagcatctgacttctggctaataaaggaaatttattttcattgcaatagtgtgttggaattttttgtgtctctcactcggaaggacatatgggagggcaaatcatttaaaacatcagaatgagtatttggtttagagtttggcaacatatgcccatatgctggctgccatgaacaaaggttggctataaagaggtcatcagtatatgaaacagccccctgctgtccattccttattccatagaaaagccttgacttgaggttagattttttttatattttgttttgtgttatttttttctttaacatccctaaaattttccttacatgttttactagccagatttttcctcctctcctgactactcccagtcatagctgtccctcttctcttatggagatccctcgacctgcagcccaagcttggcgtaatcatggtcatagctgtttcctgtgtgaaattgttatccgctcacaattccacacaacatacgagccggaagcataaagtgtaaagcctggggtgcctaatgagtgagctaactcacattaattgcgttgcgctcactgcccgctttccagtcgggaaacctgtcgtgccagcggatccgcatctcaattagtcagcaaccatagtcccgcccctaactccgcccatcccgcccctaactccgcccagttccgcccattctccgccccatggctgactaattttttttatttatgcagaggccgaggccgcctcggcctctgagctattccagaagtagtgaggaggcttttttggaggcctaggcttttgcaaaaagctaacttgtttattgcagcttataatggttacaaataaagcaatagcatcacaaatttcacaaataaagcatttttttcactgcattctagttgtggtttgtccaaactcatcaatgtatcttatcatgtctggatccgctgcattaatgaatcggccaacgcgcggggagaggcggtttgcgtattgggcgctcttccgcttcctcgctcactgactcgctgcgctcggtcgttcggctgcggcgagcggtatcagctcactcaaaggcggtaatacggttatccacagaatcaggggataacgcaggaaagaacatgtgagcaaaaggccagcaaaaggccaggaaccgtaaaaaggccgcgttgctggcgtttttccataggctccgcccccctgacgagcatcacaaaaatcgacgctcaagtcagaggtggcgaaacccgacaggactataaagataccaggcgtttccccctggaagctccctcgtgcgctctcctgttccgaccctgccgcttaccggatacctgtccgcctttctcccttcgggaagcgtggcgctttctcatagctcacgctgtaggtatctcagttcggtgtaggtcgttcgctccaagctgggctgtgtgcacgaaccccccgttcagcccgaccgctgcgccttatccggtaactatcgtcttgagtccaacccggtaagacacgacttatcgccactggcagcagccactggtaacaggattagcagagcgaggtatgtaggcggtgctacagagttcttgaagtggtggcctaactacggctacactagaagaacagtatttggtatctgcgctctgctgaagccagttaccttcggaaaaagagttggtagctcttgatccggcaaacaaaccaccgctggtagcggtggtttttttgtttgcaagcagcagattacgcgcagaaaaaaaggatctcaagaagatcctttgatcttttctacggggtctgacgctcagtggaacgaaaactcacgttaagggattttggtcatgagattatcaaaaaggatcttcacctagatccttttaaattaaaaatgaagttttaaatcaatctaaagtatatatgagtaaacttggtctgacagttaccaatgcttaatcagtgaggcacctatctcagcgatctgtctatttcgttcatccatagttgcctgactccccgtcgtgtagataactacgatacgggagggcttaccatctggccccagtgctgcaatgataccgcgagacccacgctcaccggctccagatttatcagcaataaaccagccagccggaagggccgagcgcagaagtggtcctgcaactttatccgcctccatccagtctattaattgttgccgggaagctagagtaagtagttcgccagttaatagtttgcgcaacgttgttgccattgctacaggcatcgtggtgtcacgctcgtcgtttggtatggcttcattcagctccggttcccaacgatcaaggcgagttacatgatcccccatgttgtgcaaaaaagcggttagctccttcggtcctccgatcgttgtcagaagtaagttggccgcagtgttatcactcatggttatggcagcactgcataattctcttactgtcatgccatccgtaagatgcttttctgtgactggtgagtactcaaccaagtcattctgagaatagtgtatgcggcgaccgagttgctcttgcccggcgtcaatacgggataataccgcgccacatagcagaactttaaaagtgctcatcattggaaaacgttcttcggggcgaaaactctcaaggatcttaccgctgttgagatccagttcgatgtaacccactcgtgcacccaactgatcttcagcatcttttactttcaccagcgtttctgggtgagcaaaaacaggaaggcaaaatgccgcaaaaaagggaataagggcgacacggaaatgttgaatactcatactcttcctttttcaatattattgaagcatttatcagggttattgtctcatgagcggatacatatttgaatgtatttagaaaaataaacaaataggggttccgcgcacatttccccgaaaagtgccacctgggtcgacattgattattgactagtaatagtaatcaattacggggtcattagttcatagcccatatatggagttccg

SEQ ID NO: 3967 - RNA, 5729 nt, Homo sapiens
  source 1..5729: mol_type = other RNA
cgttacataacttacggtaaatggcccgcctggctgaccgcccaacgacccccgcccattgacgtcaataatgacgtatgttcccatagtaacgccaatagggactttccattgacgtcaatgggtggagtatttacggtaaactgcccacttggcagtacatcaagtgtatcatatgccaagtacgccccctattgacgtcaatgacggtaaatggcccgcctggcattatgcccagtacatgaccttatgggactttcctacttggcagtacatctacgtattagtcatcgctattaccatggtgatgcggttttggcagtacatcaatgggcgtggatagcggtttgactcacggggatttccaagtctccaccccattgacgtcaatgggagtttgttttggcaccaaaatcaacgggactttccaaaatgtcgtaacaactccgccccattgacgcaaatgggcggtaggcgtgtacggtgggaggtctatataagcagagctggtttagtgaaccgtcagatccgctagcgctaccggactcagatcgccaccatgtacccctacgacgtgccagactacgcccctgcggcaaaaaagaaaaagttggacggcggctctggcggcggaggatctggcggaggtggaagcggaggaccgcctaagaagaagcagaagctggaacggctgaagaaactggacaagcccacactgcacacctgtaacaagaccagcttcgccaaggccttcctgcctaacgagacataccggcagcggctgctggactatatcgccatcattcaccagctggccgaccacgcctctcacgccctgaagttttacatcctgagcacctccaccagcagcttccctgtggtgcacgaggataccatcgaggccatcctgtacctgctgaacaagggcgaagcctggcatcccagaaaagaggccaagaaggcctggcgggattgcctgctgccttacgtgcagagatactgccagatcgtgggcttcattcaccccaacctgagaggcgagcagcagagcatcaactacctgaccgtgtccatgatgaccaacctgaaagtgaacgtgcaagagcacttcatgcagatgctgctgcggtacatcaatctgcgcttcgacgtgaagggccagaagcagagactgcctcctaagagcgacgcccgcaaggcctttttcacccggctgagatacctgaagtccgtgttcctgttcgacgtggtgcccgagctggaattcctggacgatctgacccctctggaaagcgaggtgctggaagagatctggtccctggacctgccttttctgcccaacgatcctctggcctacgccatcgtggccgatcctatgagcttcttcccagcctactgcaagctgagcggcctgtacgagcagtacggcttccagcggtttagcgccattcctctgcggagaagcctgatccagtctcacgtgcggatcgacaccatcatcctgtatcagcacatcctgtgcatcaccagacgggacgccgagacagtggaaaaggacgacctgtggatgagagtgtgcaacctgcggaccaaagccttccggtccagatgcggcatgcacttcgagggcagcatcacaacagatggcgccagcgtgtccgtgtacctgaaacaccctgaggccgataagtacggcaagagaggcgccagaaagtccgccaatactgtggccgccgaagtgaaggccctgtacgtggaaaacaacctgcctgcctgtagagccgccgagaacgtggtggtcatcgaccccaacaagcgggatatcctgtactgccaggacagcaacggcaccaccttcagatacaccgccaaccagagagccgtggaaaccggcagcagaagattcgccaagcggcgggaagccatgaaggaagaagccggcgttgacctgatcgagagcagaatccctagccacaagaccatgaacctgatggacttcaccagatacctgctcgtgcggagagccgactgggacagacggaaagagttctactctcaccccgctcacacccggtggaagtggcacagcttcatcaaccggcagaagtccgagagcgacctgatcagcaacatgcggaacaaatacggccgcaacttcaccgtggtcatgggcgattggagcgacgctggaagaaccgccagattccagaccagcagcaagaccaaaggctggcggaccctgttcaagcggaaccggatcgattgcttcctgctggacgagtacaagacctccagcgtgtgccctagatgcagcagcagcgagttcgtggaaaagaagttcaagacccggcctcacagcagaccctggcgaagaagagagggcaagatcgagaaggtgcacggcctgctgggctgcaccaatcctaattgtctgcagcaggcctggaccagcggcatgagatactggaaccgggacatgctgagcacatgcaacatgctgctgatcgtgcggtccatgctggatggccatggcagacctgaggtgttctctagatctgtgcctgccgtggcctgactagcataaccccttggggcgcactcctcaggtgcaggctgcctatcagaaggtggtggctggtgtggccaatgccctggctcacaaataccactgagatctttttccctctgccaaaaattatggggacatcatgaagccccttgagcatctgacttctggctaataaaggaaatttattttcattgcaatagtgtgttggaattttttgtgtctctcactcggaaggacatatgggagggcaaatcatttaaaacatcagaatgagtatttggtttagagtttggcaacatatgcccatatgctggctgccatgaacaaaggttggctataaagaggtcatcagtatatgaaacagccccctgctgtccattccttattccatagaaaagccttgacttgaggttagattttttttatattttgttttgtgttatttttttctttaacatccctaaaattttccttacatgttttactagccagatttttcctcctctcctgactactcccagtcatagctgtccctcttctcttatggagatccctcgacctgcagcccaagcttggcgtaatcatggtcatagctgtttcctgtgtgaaattgttatccgctcacaattccacacaacatacgagccggaagcataaagtgtaaagcctggggtgcctaatgagtgagctaactcacattaattgcgttgcgctcactgcccgctttccagtcgggaaacctgtcgtgccagcggatccgcatctcaattagtcagcaaccatagtcccgcccctaactccgcccatcccgcccctaactccgcccagttccgcccattctccgccccatggctgactaattttttttatttatgcagaggccgaggccgcctcggcctctgagctattccagaagtagtgaggaggcttttttggaggcctaggcttttgcaaaaagctaacttgtttattgcagcttataatggttacaaataaagcaatagcatcacaaatttcacaaataaagcatttttttcactgcattctagttgtggtttgtccaaactcatcaatgtatcttatcatgtctggatccgctgcattaatgaatcggccaacgcgcggggagaggcggtttgcgtattgggcgctcttccgcttcctcgctcactgactcgctgcgctcggtcgttcggctgcggcgagcggtatcagctcactcaaaggcggtaatacggttatccacagaatcaggggataacgcaggaaagaacatgtgagcaaaaggccagcaaaaggccaggaaccgtaaaaaggccgcgttgctggcgtttttccataggctccgcccccctgacgagcatcacaaaaatcgacgctcaagtcagaggtggcgaaacccgacaggactataaagataccaggcgtttccccctggaagctccctcgtgcgctctcctgttccgaccctgccgcttaccggatacctgtccgcctttctcccttcgggaagcgtggcgctttctcatagctcacgctgtaggtatctcagttcggtgtaggtcgttcgctccaagctgggctgtgtgcacgaaccccccgttcagcccgaccgctgcgccttatccggtaactatcgtcttgagtccaacccggtaagacacgacttatcgccactggcagcagccactggtaacaggattagcagagcgaggtatgtaggcggtgctacagagttcttgaagtggtggcctaactacggctacactagaagaacagtatttggtatctgcgctctgctgaagccagttaccttcggaaaaagagttggtagctcttgatccggcaaacaaaccaccgctggtagcggtggtttttttgtttgcaagcagcagattacgcgcagaaaaaaaggatctcaagaagatcctttgatcttttctacggggtctgacgctcagtggaacgaaaactcacgttaagggattttggtcatgagattatcaaaaaggatcttcacctagatccttttaaattaaaaatgaagttttaaatcaatctaaagtatatatgagtaaacttggtctgacagttaccaatgcttaatcagtgaggcacctatctcagcgatctgtctatttcgttcatccatagttgcctgactccccgtcgtgtagataactacgatacgggagggcttaccatctggccccagtgctgcaatgataccgcgagacccacgctcaccggctccagatttatcagcaataaaccagccagccggaagggccgagcgcagaagtggtcctgcaactttatccgcctccatccagtctattaattgttgccgggaagctagagtaagtagttcgccagttaatagtttgcgcaacgttgttgccattgctacaggcatcgtggtgtcacgctcgtcgtttggtatggcttcattcagctccggttcccaacgatcaaggcgagttacatgatcccccatgttgtgcaaaaaagcggttagctccttcggtcctccgatcgttgtcagaagtaagttggccgcagtgttatcactcatggttatggcagcactgcataattctcttactgtcatgccatccgtaagatgcttttctgtgactggtgagtactcaaccaagtcattctgagaatagtgtatgcggcgaccgagttgctcttgcccggcgtcaatacgggataataccgcgccacatagcagaactttaaaagtgctcatcattggaaaacgttcttcggggcgaaaactctcaaggatcttaccgctgttgagatccagttcgatgtaacccactcgtgcacccaactgatcttcagcatcttttactttcaccagcgtttctgggtgagcaaaaacaggaaggcaaaatgccgcaaaaaagggaataagggcgacacggaaatgttgaatactcatactcttcctttttcaatattattgaagcatttatcagggttattgtctcatgagcggatacatatttgaatgtatttagaaaaataaacaaataggggttccgcgcacatttccccgaaaagtgccacctgggtcgacattgattattgactagtaatagtaatcaattacggggtcattagttcatagcccatatatggagttccg

SEQ ID NO: 3968 - RNA, 5729 nt, Homo sapiens
  source 1..5729: mol_type = other RNA
cgttacataacttacggtaaatggcccgcctggctgaccgcccaacgacccccgcccattgacgtcaataatgacgtatgttcccatagtaacgccaatagggactttccattgacgtcaatgggtggagtatttacggtaaactgcccacttggcagtacatcaagtgtatcatatgccaagtacgccccctattgacgtcaatgacggtaaatggcccgcctggcattatgcccagtacatgaccttatgggactttcctacttggcagtacatctacgtattagtcatcgctattaccatggtgatgcggttttggcagtacatcaatgggcgtggatagcggtttgactcacggggatttccaagtctccaccccattgacgtcaatgggagtttgttttggcaccaaaatcaacgggactttccaaaatgtcgtaacaactccgccccattgacgcaaatgggcggtaggcgtgtacggtgggaggtctatataagcagagctggtttagtgaaccgtcagatccgctagcgctaccggactcagatcgccaccatgtacccctacgacgtgccagactacgcccctgcggcaaaaaagaaaaagttggacggcggctctggcggcggaggatctggcggaggtggaagcggaggaccgcctaagaagaagcagaagctggaacggctgaagaaactggacaagcccacactgcacacctgtaacaagaccagcttcgccaaggccttcctgcctaacgagacataccggcagcggctgctggactatatcgccatcattcaccagctggccgaccacgcctctcacgccctgaagttttacatcctgagcacctccaccagcagcttccctgtggtgcacgaggataccatcgaggccatcctgtacctgctgaacaagggcgaagcctggcatcccagaaaagaggccaagaaggcctggcgggattgcctgctgccttacgtgcagagatactgccagatcgtgggcttcattcaccccaacctgagaggcgagcagcagagcatcaactacctgaccgtgtccatgatgaccaacctgaaagtgaacgtgcaagagcacttcatgcagatgctgctgcggtacatcaatctgcgcttcgacgtgaagggccagaagcagagactgcctcctaagagcgacgcccgcaaggcctttttcacccggctgagatacctgaagtccgtgttcctgttcgacgtggtgcccgagctggaattcctggacgatctgacccctctggaaagcgaggtgctggaagagatctggtccctggacctgccttttctgcccaacgatcctctggcctacgccatcgtggccgatcctatgagcttcttcccagcctactgcaagctgagcggcctgtacgagcagtacggcttccagcggtttagcgccattcctctgcggagaagcctgatccagtctcacgtgcggatcgacaccatcatcctgtatcagcacatcctgtgcatcaccagacgggacgccgagacagtggaaaaggacgacctgtggatgagagtgtgcaacctgcggaccaaagccttccggtccagatgcggcatgcacttcgagggcagcatcacaacagatggcgccagcgtgtccgtgtacctgaaacaccctgaggccgataagtacggcaagagaggcgccagaaagtccgccaatactgtggccgccgaagtgaaggccctgtacgtggaaaacaacctgcctgcctgtagagccgccgagaacgtggtggtcatcgaccccaacaagcgggatatcctgtactgccaggacagcaacggcaccaccttcagatacaccgccaaccagagagccgtggaaaccggcagcagaagattcgccaagcggcgggaagccatgaaggaagaagccggcgttgacctgatcgagagcagaatccctagccacaagaccatgaacctgatggacttcaccagatacctgctcgtgcggagagccgactgggacagacggaaagagttctactctcaccccgctcacacccggtggaagtggcacagcttcatcaaccggcagaagtccgagagcgacctgatcagcaacatgcggaacaaatacggcgagaacttcaccgtggtcatgggcgattggagcgacgctggaagaaaggccagattccagaccagcagcaagaccaaaggctggcggaccctgttcaagcggaaccggatcgattgcttcctgctggacgagtacaagacctccagcgtgtgccctagatgcagcagcagcgagttcgtggaaaagaagttcaagacccggcctcacagcagaccctggcgaagaagagagggcaagatcgagaaggtgcacggcctgctgggctgcaccaatcctaattgtctgcagcaggcctggaccagcggcatgagatactggaaccgggacatgctgagcacatgcaacatgctgctgatcgtgcggtccatgctggatggccatggcagacctgaggtgttctctagatctgtgcctgccgtggcctgactagcataaccccttggggcgcactcctcaggtgcaggctgcctatcagaaggtggtggctggtgtggccaatgccctggctcacaaataccactgagatctttttccctctgccaaaaattatggggacatcatgaagccccttgagcatctgacttctggctaataaaggaaatttattttcattgcaatagtgtgttggaattttttgtgtctctcactcggaaggacatatgggagggcaaatcatttaaaacatcagaatgagtatttggtttagagtttggcaacatatgcccatatgctggctgccatgaacaaaggttggctataaagaggtcatcagtatatgaaacagccccctgctgtccattccttattccatagaaaagccttgacttgaggttagattttttttatattttgttttgtgttatttttttctttaacatccctaaaattttccttacatgttttactagccagatttttcctcctctcctgactactcccagtcatagctgtccctcttctcttatggagatccctcgacctgcagcccaagcttggcgtaatcatggtcatagctgtttcctgtgtgaaattgttatccgctcacaattccacacaacatacgagccggaagcataaagtgtaaagcctggggtgcctaatgagtgagctaactcacattaattgcgttgcgctcactgcccgctttccagtcgggaaacctgtcgtgccagcggatccgcatctcaattagtcagcaaccatagtcccgcccctaactccgcccatcccgcccctaactccgcccagttccgcccattctccgccccatggctgactaattttttttatttatgcagaggccgaggccgcctcggcctctgagctattccagaagtagtgaggaggcttttttggaggcctaggcttttgcaaaaagctaacttgtttattgcagcttataatggttacaaataaagcaatagcatcacaaatttcacaaataaagcatttttttcactgcattctagttgtggtttgtccaaactcatcaatgtatcttatcatgtctggatccgctgcattaatgaatcggccaacgcgcggggagaggcggtttgcgtattgggcgctcttccgcttcctcgctcactgactcgctgcgctcggtcgttcggctgcggcgagcggtatcagctcactcaaaggcggtaatacggttatccacagaatcaggggataacgcaggaaagaacatgtgagcaaaaggccagcaaaaggccaggaaccgtaaaaaggccgcgttgctggcgtttttccataggctccgcccccctgacgagcatcacaaaaatcgacgctcaagtcagaggtggcgaaacccgacaggactataaagataccaggcgtttccccctggaagctccctcgtgcgctctcctgttccgaccctgccgcttaccggatacctgtccgcctttctcccttcgggaagcgtggcgctttctcatagctcacgctgtaggtatctcagttcggtgtaggtcgttcgctccaagctgggctgtgtgcacgaaccccccgttcagcccgaccgctgcgccttatccggtaactatcgtcttgagtccaacccggtaagacacgacttatcgccactggcagcagccactggtaacaggattagcagagcgaggtatgtaggcggtgctacagagttcttgaagtggtggcctaactacggctacactagaagaacagtatttggtatctgcgctctgctgaagccagttaccttcggaaaaagagttggtagctcttgatccggcaaacaaaccaccgctggtagcggtggtttttttgtttgcaagcagcagattacgcgcagaaaaaaaggatctcaagaagatcctttgatcttttctacggggtctgacgctcagtggaacgaaaactcacgttaagggattttggtcatgagattatcaaaaaggatcttcacctagatccttttaaattaaaaatgaagttttaaatcaatctaaagtatatatgagtaaacttggtctgacagttaccaatgcttaatcagtgaggcacctatctcagcgatctgtctatttcgttcatccatagttgcctgactccccgtcgtgtagataactacgatacgggagggcttaccatctggccccagtgctgcaatgataccgcgagacccacgctcaccggctccagatttatcagcaataaaccagccagccggaagggccgagcgcagaagtggtcctgcaactttatccgcctccatccagtctattaattgttgccgggaagctagagtaagtagttcgccagttaatagtttgcgcaacgttgttgccattgctacaggcatcgtggtgtcacgctcgtcgtttggtatggcttcattcagctccggttcccaacgatcaaggcgagttacatgatcccccatgttgtgcaaaaaagcggttagctccttcggtcctccgatcgttgtcagaagtaagttggccgcagtgttatcactcatggttatggcagcactgcataattctcttactgtcatgccatccgtaagatgcttttctgtgactggtgagtactcaaccaagtcattctgagaatagtgtatgcggcgaccgagttgctcttgcccggcgtcaatacgggataataccgcgccacatagcagaactttaaaagtgctcatcattggaaaacgttcttcggggcgaaaactctcaaggatcttaccgctgttgagatccagttcgatgtaacccactcgtgcacccaactgatcttcagcatcttttactttcaccagcgtttctgggtgagcaaaaacaggaaggcaaaatgccgcaaaaaagggaataagggcgacacggaaatgttgaatactcatactcttcctttttcaatattattgaagcatttatcagggttattgtctcatgagcggatacatatttgaatgtatttagaaaaataaacaaataggggttccgcgcacatttccccgaaaagtgccacctgggtcgacattgattattgactagtaatagtaatcaattacggggtcattagttcatagcccatatatggagttccg

SEQ ID NO: 3969 - RNA, 5729 nt, Homo sapiens
  source 1..5729: mol_type = other RNA
cgttacataacttacggtaaatggcccgcctggctgaccgcccaacgacccccgcccattgacgtcaataatgacgtatgttcccatagtaacgccaatagggactttccattgacgtcaatgggtggagtatttacggtaaactgcccacttggcagtacatcaagtgtatcatatgccaagtacgccccctattgacgtcaatgacggtaaatggcccgcctggcattatgcccagtacatgaccttatgggactttcctacttggcagtacatctacgtattagtcatcgctattaccatggtgatgcggttttggcagtacatcaatgggcgtggatagcggtttgactcacggggatttccaagtctccaccccattgacgtcaatgggagtttgttttggcaccaaaatcaacgggactttccaaaatgtcgtaacaactccgccccattgacgcaaatgggcggtaggcgtgtacggtgggaggtctatataagcagagctggtttagtgaaccgtcagatccgctagcgctaccggactcagatcgccaccatgtacccctacgacgtgccagactacgcccctgcggcaaaaaagaaaaagttggacggcggctctggcggcggaggatctggcggaggtggaagcggaggaccgcctaagaagaagcagaagctggaacggctgaagaaactggacaagcccacactgcacacctgtaacaagaccagcttcgccaaggccttcctgcctaacgagacataccggcagcggctgctggactatatcgccatcattcaccagctggccgaccacgcctctcacgccctgaagttttacatcctgagcacctccaccagcagcttccctgtggtgcacgaggataccatcgaggccatcctgtacctgctgaacaagggcgaagcctggcatcccagaaaagaggccaagaaggcctggcgggattgcctgctgccttacgtgcagagatactgccagatcgtgggcttcattcaccccaacctgagaggcgagcagcagagcatcaactacctgaccgtgtccatgatgaccaacctgaaagtgaacgtgcaagagcacttcatgcagatgctgctgcggtacatcaatctgcgcttcgacgtgaagggccagaagcagagactgcctcctaagagcgacgcccgcaaggcctttttcacccggctgagatacctgaagtccgtgttcctgttcgacgtggtgcccgagctggaattcctggacgatctgacccctctggaaagcgaggtgctggaagagatctggtccctggacctgccttttctgcccaacgatcctctggcctacgccatcgtggccgatcctatgagcttcttcccagcctactgcaagctgagcggcctgtacgagcagtacggcttccagcggtttagcgccattcctctgcggagaagcctgatccagtctcacgtgcggatcgacaccatcatcctgtatcagcacatcctgtgcatcaccagacgggacgccgagacagtggaaaaggacgacctgtggatgagagtgtgcaacctgtgcaccaaagccttccggtccagatgcggcatgcacttcgagggcagcatcacaacagatggcgccagcgtgtccgtgtacctgaaacaccctgaggccgataagtacggcaagagaggcgccagaaagtccgccaatactgtggccgccgaagtgaaggccctgtacgtggaaaacaacctgcctgcctgtagagccgccgagaacgtggtggtcatcgaccccaacaagcgggatatcctgtactgccaggacagcaacggcaccaccttcagatacaccgccaaccagagagccgtggaaaccggcagcagaagattcgccaagcggcgggaagccatgaaggaagaagccggcgttgacctgatcgagagcagaatccctagccacaagaccatgaacctgatggacttcaccagatacctgctcgtgcggagagccgactgggacagacggaaagagttctactctcaccccgctcacacccggtggaagtggcacagcttcatcaaccggcagaagtccgagagcaagctgatcagcaacatgcggaacaaatacggccgcaacttcaccgtggtcatgggcgattggagcgacgctggaagaaccgccagattccagaccagcagcaagaccaaaggctggcggaccctgttcaagcggaaccggatcgattgcttcctgctggacgagtacaagacctccagcgtgtgccctagatgcagcagcagcgagttcgtggaaaagaagttcaagacccggcctcacagcagaccctggcgaagaagagagggcaagatcgagaaggtgcacggcctgctgggctgcaccaatcctaattgtctgcagcaggcctggaccagcggcatgagatactggaaccgggacatgctgagcacatgcaacatgctgctgatcgtgcggtccatgctggatggccatggcagacctgaggtgttctctagatctgtgcctgccgtggcctgactagcataaccccttggggcgcactcctcaggtgcaggctgcctatcagaaggtggtggctggtgtggccaatgccctggctcacaaataccactgagatctttttccctctgccaaaaattatggggacatcatgaagccccttgagcatctgacttctggctaataaaggaaatttattttcattgcaatagtgtgttggaattttttgtgtctctcactcggaaggacatatgggagggcaaatcatttaaaacatcagaatgagtatttggtttagagtttggcaacatatgcccatatgctggctgccatgaacaaaggttggctataaagaggtcatcagtatatgaaacagccccctgctgtccattccttattccatagaaaagccttgacttgaggttagattttttttatattttgttttgtgttatttttttctttaacatccctaaaattttccttacatgttttactagccagatttttcctcctctcctgactactcccagtcatagctgtccctcttctcttatggagatccctcgacctgcagcccaagcttggcgtaatcatggtcatagctgtttcctgtgtgaaattgttatccgctcacaattccacacaacatacgagccggaagcataaagtgtaaagcctggggtgcctaatgagtgagctaactcacattaattgcgttgcgctcactgcccgctttccagtcgggaaacctgtcgtgccagcggatccgcatctcaattagtcagcaaccatagtcccgcccctaactccgcccatcccgcccctaactccgcccagttccgcccattctccgccccatggctgactaattttttttatttatgcagaggccgaggccgcctcggcctctgagctattccagaagtagtgaggaggcttttttggaggcctaggcttttgcaaaaagctaacttgtttattgcagcttataatggttacaaataaagcaatagcatcacaaatttcacaaataaagcatttttttcactgcattctagttgtggtttgtccaaactcatcaatgtatcttatcatgtctggatccgctgcattaatgaatcggccaacgcgcggggagaggcggtttgcgtattgggcgctcttccgcttcctcgctcactgactcgctgcgctcggtcgttcggctgcggcgagcggtatcagctcactcaaaggcggtaatacggttatccacagaatcaggggataacgcaggaaagaacatgtgagcaaaaggccagcaaaaggccaggaaccgtaaaaaggccgcgttgctggcgtttttccataggctccgcccccctgacgagcatcacaaaaatcgacgctcaagtcagaggtggcgaaacccgacaggactataaagataccaggcgtttccccctggaagctccctcgtgcgctctcctgttccgaccctgccgcttaccggatacctgtccgcctttctcccttcgggaagcgtggcgctttctcatagctcacgctgtaggtatctcagttcggtgtaggtcgttcgctccaagctgggctgtgtgcacgaaccccccgttcagcccgaccgctgcgccttatccggtaactatcgtcttgagtccaacccggtaagacacgacttatcgccactggcagcagccactggtaacaggattagcagagcgaggtatgtaggcggtgctacagagttcttgaagtggtggcctaactacggctacactagaagaacagtatttggtatctgcgctctgctgaagccagttaccttcggaaaaagagttggtagctcttgatccggcaaacaaaccaccgctggtagcggtggtttttttgtttgcaagcagcagattacgcgcagaaaaaaaggatctcaagaagatcctttgatcttttctacggggtctgacgctcagtggaacgaaaactcacgttaagggattttggtcatgagattatcaaaaaggatcttcacctagatccttttaaattaaaaatgaagttttaaatcaatctaaagtatatatgagtaaacttggtctgacagttaccaatgcttaatcagtgaggcacctatctcagcgatctgtctatttcgttcatccatagttgcctgactccccgtcgtgtagataactacgatacgggagggcttaccatctggccccagtgctgcaatgataccgcgagacccacgctcaccggctccagatttatcagcaataaaccagccagccggaagggccgagcgcagaagtggtcctgcaactttatccgcctccatccagtctattaattgttgccgggaagctagagtaagtagttcgccagttaatagtttgcgcaacgttgttgccattgctacaggcatcgtggtgtcacgctcgtcgtttggtatggcttcattcagctccggttcccaacgatcaaggcgagttacatgatcccccatgttgtgcaaaaaagcggttagctccttcggtcctccgatcgttgtcagaagtaagttggccgcagtgttatcactcatggttatggcagcactgcataattctcttactgtcatgccatccgtaagatgcttttctgtgactggtgagtactcaaccaagtcattctgagaatagtgtatgcggcgaccgagttgctcttgcccggcgtcaatacgggataataccgcgccacatagcagaactttaaaagtgctcatcattggaaaacgttcttcggggcgaaaactctcaaggatcttaccgctgttgagatccagttcgatgtaacccactcgtgcacccaactgatcttcagcatcttttactttcaccagcgtttctgggtgagcaaaaacaggaaggcaaaatgccgcaaaaaagggaataagggcgacacggaaatgttgaatactcatactcttcctttttcaatattattgaagcatttatcagggttattgtctcatgagcggatacatatttgaatgtatttagaaaaataaacaaataggggttccgcgcacatttccccgaaaagtgccacctgggtcgacattgattattgactagtaatagtaatcaattacggggtcattagttcatagcccatatatggagttccg

SEQ ID NO: 3970 - RNA, 5729 nt, Homo sapiens
  source 1..5729: mol_type = other RNA
cgttacataacttacggtaaatggcccgcctggctgaccgcccaacgacccccgcccattgacgtcaataatgacgtatgttcccatagtaacgccaatagggactttccattgacgtcaatgggtggagtatttacggtaaactgcccacttggcagtacatcaagtgtatcatatgccaagtacgccccctattgacgtcaatgacggtaaatggcccgcctggcattatgcccagtacatgaccttatgggactttcctacttggcagtacatctacgtattagtcatcgctattaccatggtgatgcggttttggcagtacatcaatgggcgtggatagcggtttgactcacggggatttccaagtctccaccccattgacgtcaatgggagtttgttttggcaccaaaatcaacgggactttccaaaatgtcgtaacaactccgccccattgacgcaaatgggcggtaggcgtgtacggtgggaggtctatataagcagagctggtttagtgaaccgtcagatccgctagcgctaccggactcagatcgccaccatgtacccctacgacgtgccagactacgcccctgcggcaaaaaagaaaaagttggacggcggctctggcggcggaggatctggcggaggtggaagcggaggaccgcctaagaagaagcagaagctggaacggctgaagaaactggacaagcccacactgcacacctgtaacaagaccagcttcgccaaggccttcctgcctaacgagacataccggcagcggctgctggactatatcgccatcattcaccagctggccgaccacgcctctcacgccctgaagttttacatcctgagcacctccaccagcagcttccctgtggtgcacgaggataccatcgaggccatcctgtacctgctgaacaagggcgaagcctggcatcccagaaaagaggccaagaaggcctggcgggattgcctgctgccttacgtgcagagatactgccagatcgtgggcttcattcaccccaacctgagaggcgagcagcagagcatcaactacctgaccgtgtccatgatgaccaacctgaaagtgaacgtgcaagagcacttcatgcagatgctgctgcggtacatcaatctgcgcttcgacgtgaagggccagaagcagagactgcctcctaagagcgacgcccgcaaggcctttttcacccggctgagatacctgaagtccgtgttcctgttcgacgtggtgcccgagctggaattcctggacgatctgacccctctggaaagcgaggtgctggaagagatctggtccctggacctgccttttctgcccaacgatcctctggcctacgccatcgtggccgatcctatgagcttcttcccagcctactgcaagctgagcggcctgtacgagcagtacggcttccagcggtttagcgccattcctctgcggagaagcctgatccagtctcacgtgcggatcgacaccatcatcctgtatcagcacatcctgtgcatcaccagacgggacgccgagacagtggaaaaggacgacctgtggatgagagtgtgcaacctgtgcaccaaagccttccggtccagatgcggcatgcacttcgagggcagcatcacaacagatggcgccagcgtgtccgtgtacctgaaacaccctgaggccgataagtacggcaagagaggcgccagaaagtccgccaatactgtggccgccgaagtgaaggccctgtacgtggaaaacaacctgcctgcctgtagagccgccgagaacgtggtggtcatcgaccccaacaagcgggatatcctgtactgccaggacagcaacggcaccaccttcagatacaccgccaaccagagagccgtggaaaccggcagcagaagattcgccaagcggcgggaagccatgaaggaagaagccggcgttgacctgatcgagagcagaatccctagccacaagaccatgaacctgatggacttcaccagatacctgctcgtgcggagagccgactgggacagacggaaagagttctactctcaccccgctcacacccggtggaagtggcacagcttcatcaaccggcagaagtccgagagcaagctgatcagcaacatgcggaacaaatacggcgagaacttcaccgtggtcatgggcgattggagcgacgctggaagaaaggccagattccagaccagcagcaagaccaaaggctggcggaccctgttcaagcggaaccggatcgattgcttcctgctggacgagtacaagacctccagcgtgtgccctagatgcagcagcagcgagttcgtggaaaagaagttcaagacccggcctcacagcagaccctggcgaagaagagagggcaagatcgagaaggtgcacggcctgctgggctgcaccaatcctaattgtctgcagcaggcctggaccagcggcatgagatactggaaccgggacatgctgagcacatgcaacatgctgctgatcgtgcggtccatgctggatggccatggcagacctgaggtgttctctagatctgtgcctgccgtggcctgactagcataaccccttggggcgcactcctcaggtgcaggctgcctatcagaaggtggtggctggtgtggccaatgccctggctcacaaataccactgagatctttttccctctgccaaaaattatggggacatcatgaagccccttgagcatctgacttctggctaataaaggaaatttattttcattgcaatagtgtgttggaattttttgtgtctctcactcggaaggacatatgggagggcaaatcatttaaaacatcagaatgagtatttggtttagagtttggcaacatatgcccatatgctggctgccatgaacaaaggttggctataaagaggtcatcagtatatgaaacagccccctgctgtccattccttattccatagaaaagccttgacttgaggttagattttttttatattttgttttgtgttatttttttctttaacatccctaaaattttccttacatgttttactagccagatttttcctcctctcctgactactcccagtcatagctgtccctcttctcttatggagatccctcgacctgcagcccaagcttggcgtaatcatggtcatagctgtttcctgtgtgaaattgttatccgctcacaattccacacaacatacgagccggaagcataaagtgtaaagcctggggtgcctaatgagtgagctaactcacattaattgcgttgcgctcactgcccgctttccagtcgggaaacctgtcgtgccagcggatccgcatctcaattagtcagcaaccatagtcccgcccctaactccgcccatcccgcccctaactccgcccagttccgcccattctccgccccatggctgactaattttttttatttatgcagaggccgaggccgcctcggcctctgagctattccagaagtagtgaggaggcttttttggaggcctaggcttttgcaaaaagctaacttgtttattgcagcttataatggttacaaataaagcaatagcatcacaaatttcacaaataaagcatttttttcactgcattctagttgtggtttgtccaaactcatcaatgtatcttatcatgtctggatccgctgcattaatgaatcggccaacgcgcggggagaggcggtttgcgtattgggcgctcttccgcttcctcgctcactgactcgctgcgctcggtcgttcggctgcggcgagcggtatcagctcactcaaaggcggtaatacggttatccacagaatcaggggataacgcaggaaagaacatgtgagcaaaaggccagcaaaaggccaggaaccgtaaaaaggccgcgttgctggcgtttttccataggctccgcccccctgacgagcatcacaaaaatcgacgctcaagtcagaggtggcgaaacccgacaggactataaagataccaggcgtttccccctggaagctccctcgtgcgctctcctgttccgaccctgccgcttaccggatacctgtccgcctttctcccttcgggaagcgtggcgctttctcatagctcacgctgtaggtatctcagttcggtgtaggtcgttcgctccaagctgggctgtgtgcacgaaccccccgttcagcccgaccgctgcgccttatccggtaactatcgtcttgagtccaacccggtaagacacgacttatcgccactggcagcagccactggtaacaggattagcagagcgaggtatgtaggcggtgctacagagttcttgaagtggtggcctaactacggctacactagaagaacagtatttggtatctgcgctctgctgaagccagttaccttcggaaaaagagttggtagctcttgatccggcaaacaaaccaccgctggtagcggtggtttttttgtttgcaagcagcagattacgcgcagaaaaaaaggatctcaagaagatcctttgatcttttctacggggtctgacgctcagtggaacgaaaactcacgttaagggattttggtcatgagattatcaaaaaggatcttcacctagatccttttaaattaaaaatgaagttttaaatcaatctaaagtatatatgagtaaacttggtctgacagttaccaatgcttaatcagtgaggcacctatctcagcgatctgtctatttcgttcatccatagttgcctgactccccgtcgtgtagataactacgatacgggagggcttaccatctggccccagtgctgcaatgataccgcgagacccacgctcaccggctccagatttatcagcaataaaccagccagccggaagggccgagcgcagaagtggtcctgcaactttatccgcctccatccagtctattaattgttgccgggaagctagagtaagtagttcgccagttaatagtttgcgcaacgttgttgccattgctacaggcatcgtggtgtcacgctcgtcgtttggtatggcttcattcagctccggttcccaacgatcaaggcgagttacatgatcccccatgttgtgcaaaaaagcggttagctccttcggtcctccgatcgttgtcagaagtaagttggccgcagtgttatcactcatggttatggcagcactgcataattctcttactgtcatgccatccgtaagatgcttttctgtgactggtgagtactcaaccaagtcattctgagaatagtgtatgcggcgaccgagttgctcttgcccggcgtcaatacgggataataccgcgccacatagcagaactttaaaagtgctcatcattggaaaacgttcttcggggcgaaaactctcaaggatcttaccgctgttgagatccagttcgatgtaacccactcgtgcacccaactgatcttcagcatcttttactttcaccagcgtttctgggtgagcaaaaacaggaaggcaaaatgccgcaaaaaagggaataagggcgacacggaaatgttgaatactcatactcttcctttttcaatattattgaagcatttatcagggttattgtctcatgagcggatacatatttgaatgtatttagaaaaataaacaaataggggttccgcgcacatttccccgaaaagtgccacctgggtcgacattgattattgactagtaatagtaatcaattacggggtcattagttcatagcccatatatggagttccg

SEQ ID NO: 3971 - RNA, 5729 nt, Homo sapiens
  source 1..5729: mol_type = other RNA
cgttacataacttacggtaaatggcccgcctggctgaccgcccaacgacccccgcccattgacgtcaataatgacgtatgttcccatagtaacgccaatagggactttccattgacgtcaatgggtggagtatttacggtaaactgcccacttggcagtacatcaagtgtatcatatgccaagtacgccccctattgacgtcaatgacggtaaatggcccgcctggcattatgcccagtacatgaccttatgggactttcctacttggcagtacatctacgtattagtcatcgctattaccatggtgatgcggttttggcagtacatcaatgggcgtggatagcggtttgactcacggggatttccaagtctccaccccattgacgtcaatgggagtttgttttggcaccaaaatcaacgggactttccaaaatgtcgtaacaactccgccccattgacgcaaatgggcggtaggcgtgtacggtgggaggtctatataagcagagctggtttagtgaaccgtcagatccgctagcgctaccggactcagatcgccaccatgtacccctacgacgtgccagactacgcccctgcggcaaaaaagaaaaagttggacggcggctctggcggcggaggatctggcggaggtggaagcggaggaccgcctaagaagaagcagaagctggaacggctgaagaaactggacaagcccacactgcacacctgtaacaagaccagcttcgccaaggccttcctgcctaacgagacataccggcagcggctgctggactatatcgccatcattcaccagctggccgaccacgcctctcacgccctgaagttttacatcctgagcacctccaccagcagcttccctgtggtgcacgaggataccatcgaggccatcctgtacctgctgaacaagggcgaagcctggcatcccagaaaagaggccaagaaggcctggcgggattgcctgctgccttacgtgcagagatactgccagatcgtgggcttcattcaccccaacctgagaggcgagcagcagagcatcaactacctgaccgtgtccatgatgaccaacctgaaagtgaacgtgcaagagcacttcatgcagatgctgctgcggtacatcaatctgcgcttcgacgtgaagggccagaagcagagactgcctcctaagagcgacgcccgcaaggcctttttcacccggctgagatacctgaagtccgtgttcctgttcgacgtggtgcccgagctggaattcctggacgatctgacccctctggaaagcgaggtgctggaagagatctggtccctggacctgccttttctgcccaacgatcctctggcctacgccatcgtggccgatcctatgagcttcttcccagcctactgcaagctgagcggcctgtacgagcagtacggcttccagcggtttagcgccattcctctgcggagaagcctgatccagtctcacgtgcggatcgacaccatcatcctgtatcagcacatcctgtgcatcaccagacgggacgccgagacagtggaaaaggacgacctgtggatgagagtgtgcaacctgtgcaccaaagccttccggtccagatgcggcatgcacttcgagggcagcatcacaacagatggcgccagcgtgtccgtgtacctgaaacaccctgaggccgataagtacggcaagagaggcgccagaaagtccgccaatactgtggccgccgaagtgaaggccctgtacgtggaaaacaacctgcctgcctgtagagccgccgagaacgtggtggtcatcgaccccaacaagcgggatatcctgtactgccaggacagcaacggcaccaccttcagatacaccgccaaccagagagccgtggaaaccggcagcagaagattcgccaagcggcgggaagccatgaaggaagaagccggcgttgacctgatcgagagcagaatccctagccacaagaccatgaacctgatggacttcaccagatacctgctcgtgcggagagccgactgggacagacggaaagagttctactctcaccccgctcacacccggtggaagtggcacagcttcatcaaccggcagaagtccgagagcgacctgatcagcaacatgcggaacaaatacggccgcaacttcaccgtggtcatgggcgattggagcgacgctggaagaaaggccagattccagaccagcagcaagaccaaaggctggcggaccctgttcaagcggaaccggatcgattgcttcctgctggacgagtacaagacctccagcgtgtgccctagatgcagcagcagcgagttcgtggaaaagaagttcaagacccggcctcacagcagaccctggcgaagaagagagggcaagatcgagaaggtgcacggcctgctgggctgcaccaatcctaattgtctgcagcaggcctggaccagcggcatgagatactggaaccgggacatgctgagcacatgcaacatgctgctgatcgtgcggtccatgctggatggccatggcagacctgaggtgttctctagatctgtgcctgccgtggcctgactagcataaccccttggggcgcactcctcaggtgcaggctgcctatcagaaggtggtggctggtgtggccaatgccctggctcacaaataccactgagatctttttccctctgccaaaaattatggggacatcatgaagccccttgagcatctgacttctggctaataaaggaaatttattttcattgcaatagtgtgttggaattttttgtgtctctcactcggaaggacatatgggagggcaaatcatttaaaacatcagaatgagtatttggtttagagtttggcaacatatgcccatatgctggctgccatgaacaaaggttggctataaagaggtcatcagtatatgaaacagccccctgctgtccattccttattccatagaaaagccttgacttgaggttagattttttttatattttgttttgtgttatttttttctttaacatccctaaaattttccttacatgttttactagccagatttttcctcctctcctgactactcccagtcatagctgtccctcttctcttatggagatccctcgacctgcagcccaagcttggcgtaatcatggtcatagctgtttcctgtgtgaaattgttatccgctcacaattccacacaacatacgagccggaagcataaagtgtaaagcctggggtgcctaatgagtgagctaactcacattaattgcgttgcgctcactgcccgctttccagtcgggaaacctgtcgtgccagcggatccgcatctcaattagtcagcaaccatagtcccgcccctaactccgcccatcccgcccctaactccgcccagttccgcccattctccgccccatggctgactaattttttttatttatgcagaggccgaggccgcctcggcctctgagctattccagaagtagtgaggaggcttttttggaggcctaggcttttgcaaaaagctaacttgtttattgcagcttataatggttacaaataaagcaatagcatcacaaatttcacaaataaagcatttttttcactgcattctagttgtggtttgtccaaactcatcaatgtatcttatcatgtctggatccgctgcattaatgaatcggccaacgcgcggggagaggcggtttgcgtattgggcgctcttccgcttcctcgctcactgactcgctgcgctcggtcgttcggctgcggcgagcggtatcagctcactcaaaggcggtaatacggttatccacagaatcaggggataacgcaggaaagaacatgtgagcaaaaggccagcaaaaggccaggaaccgtaaaaaggccgcgttgctggcgtttttccataggctccgcccccctgacgagcatcacaaaaatcgacgctcaagtcagaggtggcgaaacccgacaggactataaagataccaggcgtttccccctggaagctccctcgtgcgctctcctgttccgaccctgccgcttaccggatacctgtccgcctttctcccttcgggaagcgtggcgctttctcatagctcacgctgtaggtatctcagttcggtgtaggtcgttcgctccaagctgggctgtgtgcacgaaccccccgttcagcccgaccgctgcgccttatccggtaactatcgtcttgagtccaacccggtaagacacgacttatcgccactggcagcagccactggtaacaggattagcagagcgaggtatgtaggcggtgctacagagttcttgaagtggtggcctaactacggctacactagaagaacagtatttggtatctgcgctctgctgaagccagttaccttcggaaaaagagttggtagctcttgatccggcaaacaaaccaccgctggtagcggtggtttttttgtttgcaagcagcagattacgcgcagaaaaaaaggatctcaagaagatcctttgatcttttctacggggtctgacgctcagtggaacgaaaactcacgttaagggattttggtcatgagattatcaaaaaggatcttcacctagatccttttaaattaaaaatgaagttttaaatcaatctaaagtatatatgagtaaacttggtctgacagttaccaatgcttaatcagtgaggcacctatctcagcgatctgtctatttcgttcatccatagttgcctgactccccgtcgtgtagataactacgatacgggagggcttaccatctggccccagtgctgcaatgataccgcgagacccacgctcaccggctccagatttatcagcaataaaccagccagccggaagggccgagcgcagaagtggtcctgcaactttatccgcctccatccagtctattaattgttgccgggaagctagagtaagtagttcgccagttaatagtttgcgcaacgttgttgccattgctacaggcatcgtggtgtcacgctcgtcgtttggtatggcttcattcagctccggttcccaacgatcaaggcgagttacatgatcccccatgttgtgcaaaaaagcggttagctccttcggtcctccgatcgttgtcagaagtaagttggccgcagtgttatcactcatggttatggcagcactgcataattctcttactgtcatgccatccgtaagatgcttttctgtgactggtgagtactcaaccaagtcattctgagaatagtgtatgcggcgaccgagttgctcttgcccggcgtcaatacgggataataccgcgccacatagcagaactttaaaagtgctcatcattggaaaacgttcttcggggcgaaaactctcaaggatcttaccgctgttgagatccagttcgatgtaacccactcgtgcacccaactgatcttcagcatcttttactttcaccagcgtttctgggtgagcaaaaacaggaaggcaaaatgccgcaaaaaagggaataagggcgacacggaaatgttgaatactcatactcttcctttttcaatattattgaagcatttatcagggttattgtctcatgagcggatacatatttgaatgtatttagaaaaataaacaaataggggttccgcgcacatttccccgaaaagtgccacctgggtcgacattgattattgactagtaatagtaatcaattacggggtcattagttcatagcccatatatggagttccg

SEQ ID NO: 3972 - RNA, 5729 nt, Homo sapiens
  source 1..5729: mol_type = other RNA
cgttacataacttacggtaaatggcccgcctggctgaccgcccaacgacccccgcccattgacgtcaataatgacgtatgttcccatagtaacgccaatagggactttccattgacgtcaatgggtggagtatttacggtaaactgcccacttggcagtacatcaagtgtatcatatgccaagtacgccccctattgacgtcaatgacggtaaatggcccgcctggcattatgcccagtacatgaccttatgggactttcctacttggcagtacatctacgtattagtcatcgctattaccatggtgatgcggttttggcagtacatcaatgggcgtggatagcggtttgactcacggggatttccaagtctccaccccattgacgtcaatgggagtttgttttggcaccaaaatcaacgggactttccaaaatgtcgtaacaactccgccccattgacgcaaatgggcggtaggcgtgtacggtgggaggtctatataagcagagctggtttagtgaaccgtcagatccgctagcgctaccggactcagatcgccaccatgtacccctacgacgtgccagactacgcccctgcggcaaaaaagaaaaagttggacggcggctctggcggcggaggatctggcggaggtggaagcggaggaccgcctaagaagaagcagaagctggaacggctgaagaaactggacaagcccacactgcacacctgtaacaagaccagcttcgccaaggccttcctgcctaacgagacataccggcagcggctgctggactatatcgccatcattcaccagctggccgaccacgcctctcacgccctgaagttttacatcctgagcacctccaccagcagcttccctgtggtgcacgaggataccatcgaggccatcctgtacctgctgaacaagggcgaagcctggcatcccagaaaagaggccaagaaggcctggcgggattgcctgctgccttacgtgcagagatactgccagatcgtgggcttcattcaccccaacctgagaggcgagcagcagagcatcaactacctgaccgtgtccatgatgaccaacctgaaagtgaacgtgcaagagcacttcatgcagatgctgctgcggtacatcaatctgcgcttcgacgtgaagggccagaagcagagactgcctcctaagagcgacgcccgcaaggcctttttcacccggctgagatacctgaagtccgtgttcctgttcgacgtggtgcccgagctggaattcctggacgatctgacccctctggaaagcgaggtgctggaagagatctggtccctggacctgccttttctgcccaacgatcctctggcctacgccatcgtggccgatcctatgagcttcttcccagcctactgcaagctgagcggcctgtacgagcagtacggcttccagcggtttagcgccattcctctgcggagaagcctgatccagtctcacgtgcggatcgacaccatcatcctgtatcagcacatcctgtgcatcaccagacgggacgccgagacagtggaaaagcgcgacctgtggatgagagtgtgcaacctgcggaccaaagccttccggtccagatgcggcatgcacttcgagggcagcatcacaacagatggcgccagcgtgtccgtgtacctgaaacaccctgaggccgataagtacggcaagagaggcgccagaaagtccgccaatactgtggccgccgaagtgaaggccctgtacgtggaaaacaacctgcctgcctgtagagccgccgagaacgtggtggtcatcgaccccaacaagcgggatatcctgtactgccaggacagcaacggcaccaccttcagatacaccgccaaccagagagccgtggaaaccggcagcagaagattcgccaagcggcgggaagccatgaaggaagaagccggcgttgacctgatcgagagcagaatccctagccacaagaccatgaacctgatggacttcaccagatacctgctcgtgcggagagccgactgggacagacggaaagagttctactctcaccccgctcacacccggtggaagtggcacagcttcatcaaccggcagaagtccgagagcaagctgatcagcaacatgcggaacaaatacggcgagaacttcaccgtggtcatgggcgattggagcgacgctggaagaaccgccagattccagaccagcagcaagaccaaaggctggcggaccctgttcaagcggaaccggatcgattgcttcctgctggacgagtacaagacctccagcgtgtgccctagatgcagcagcagcgagttcgtggaaaagaagttcaagacccggcctcacagcagaccctggcgaagaagagagggcaagatcgagaaggtgcacggcctgctgggctgcaccaatcctaattgtctgcagcaggcctggaccagcggcatgagatactggaaccgggacatgctgagcacatgcaacatgctgctgatcgtgcggtccatgctggatggccatggcagacctgaggtgttctctagatctgtgcctgccgtggcctgactagcataaccccttggggcgcactcctcaggtgcaggctgcctatcagaaggtggtggctggtgtggccaatgccctggctcacaaataccactgagatctttttccctctgccaaaaattatggggacatcatgaagccccttgagcatctgacttctggctaataaaggaaatttattttcattgcaatagtgtgttggaattttttgtgtctctcactcggaaggacatatgggagggcaaatcatttaaaacatcagaatgagtatttggtttagagtttggcaacatatgcccatatgctggctgccatgaacaaaggttggctataaagaggtcatcagtatatgaaacagccccctgctgtccattccttattccatagaaaagccttgacttgaggttagattttttttatattttgttttgtgttatttttttctttaacatccctaaaattttccttacatgttttactagccagatttttcctcctctcctgactactcccagtcatagctgtccctcttctcttatggagatccctcgacctgcagcccaagcttggcgtaatcatggtcatagctgtttcctgtgtgaaattgttatccgctcacaattccacacaacatacgagccggaagcataaagtgtaaagcctggggtgcctaatgagtgagctaactcacattaattgcgttgcgctcactgcccgctttccagtcgggaaacctgtcgtgccagcggatccgcatctcaattagtcagcaaccatagtcccgcccctaactccgcccatcccgcccctaactccgcccagttccgcccattctccgccccatggctgactaattttttttatttatgcagaggccgaggccgcctcggcctctgagctattccagaagtagtgaggaggcttttttggaggcctaggcttttgcaaaaagctaacttgtttattgcagcttataatggttacaaataaagcaatagcatcacaaatttcacaaataaagcatttttttcactgcattctagttgtggtttgtccaaactcatcaatgtatcttatcatgtctggatccgctgcattaatgaatcggccaacgcgcggggagaggcggtttgcgtattgggcgctcttccgcttcctcgctcactgactcgctgcgctcggtcgttcggctgcggcgagcggtatcagctcactcaaaggcggtaatacggttatccacagaatcaggggataacgcaggaaagaacatgtgagcaaaaggccagcaaaaggccaggaaccgtaaaaaggccgcgttgctggcgtttttccataggctccgcccccctgacgagcatcacaaaaatcgacgctcaagtcagaggtggcgaaacccgacaggactataaagataccaggcgtttccccctggaagctccctcgtgcgctctcctgttccgaccctgccgcttaccggatacctgtccgcctttctcccttcgggaagcgtggcgctttctcatagctcacgctgtaggtatctcagttcggtgtaggtcgttcgctccaagctgggctgtgtgcacgaaccccccgttcagcccgaccgctgcgccttatccggtaactatcgtcttgagtccaacccggtaagacacgacttatcgccactggcagcagccactggtaacaggattagcagagcgaggtatgtaggcggtgctacagagttcttgaagtggtggcctaactacggctacactagaagaacagtatttggtatctgcgctctgctgaagccagttaccttcggaaaaagagttggtagctcttgatccggcaaacaaaccaccgctggtagcggtggtttttttgtttgcaagcagcagattacgcgcagaaaaaaaggatctcaagaagatcctttgatcttttctacggggtctgacgctcagtggaacgaaaactcacgttaagggattttggtcatgagattatcaaaaaggatcttcacctagatccttttaaattaaaaatgaagttttaaatcaatctaaagtatatatgagtaaacttggtctgacagttaccaatgcttaatcagtgaggcacctatctcagcgatctgtctatttcgttcatccatagttgcctgactccccgtcgtgtagataactacgatacgggagggcttaccatctggccccagtgctgcaatgataccgcgagacccacgctcaccggctccagatttatcagcaataaaccagccagccggaagggccgagcgcagaagtggtcctgcaactttatccgcctccatccagtctattaattgttgccgggaagctagagtaagtagttcgccagttaatagtttgcgcaacgttgttgccattgctacaggcatcgtggtgtcacgctcgtcgtttggtatggcttcattcagctccggttcccaacgatcaaggcgagttacatgatcccccatgttgtgcaaaaaagcggttagctccttcggtcctccgatcgttgtcagaagtaagttggccgcagtgttatcactcatggttatggcagcactgcataattctcttactgtcatgccatccgtaagatgcttttctgtgactggtgagtactcaaccaagtcattctgagaatagtgtatgcggcgaccgagttgctcttgcccggcgtcaatacgggataataccgcgccacatagcagaactttaaaagtgctcatcattggaaaacgttcttcggggcgaaaactctcaaggatcttaccgctgttgagatccagttcgatgtaacccactcgtgcacccaactgatcttcagcatcttttactttcaccagcgtttctgggtgagcaaaaacaggaaggcaaaatgccgcaaaaaagggaataagggcgacacggaaatgttgaatactcatactcttcctttttcaatattattgaagcatttatcagggttattgtctcatgagcggatacatatttgaatgtatttagaaaaataaacaaataggggttccgcgcacatttccccgaaaagtgccacctgggtcgacattgattattgactagtaatagtaatcaattacggggtcattagttcatagcccatatatggagttccg

SEQ ID NO: 3973 - RNA, 5729 nt, Homo sapiens
  source 1..5729: mol_type = other RNA
cgttacataacttacggtaaatggcccgcctggctgaccgcccaacgacccccgcccattgacgtcaataatgacgtatgttcccatagtaacgccaatagggactttccattgacgtcaatgggtggagtatttacggtaaactgcccacttggcagtacatcaagtgtatcatatgccaagtacgccccctattgacgtcaatgacggtaaatggcccgcctggcattatgcccagtacatgaccttatgggactttcctacttggcagtacatctacgtattagtcatcgctattaccatggtgatgcggttttggcagtacatcaatgggcgtggatagcggtttgactcacggggatttccaagtctccaccccattgacgtcaatgggagtttgttttggcaccaaaatcaacgggactttccaaaatgtcgtaacaactccgccccattgacgcaaatgggcggtaggcgtgtacggtgggaggtctatataagcagagctggtttagtgaaccgtcagatccgctagcgctaccggactcagatcgccaccatgtacccctacgacgtgccagactacgcccctgcggcaaaaaagaaaaagttggacggcggctctggcggcggaggatctggcggaggtggaagcggaggaccgcctaagaagaagcagaagctggaacggctgaagaaactggacaagcccacactgcacacctgtaacaagaccagcttcgccaaggccttcctgcctaacgagacataccggcagcggctgctggactatatcgccatcattcaccagctggccgaccacgcctctcacgccctgaagttttacatcctgagcacctccaccagcagcttccctgtggtgcacgaggataccatcgaggccatcctgtacctgctgaacaagggcgaagcctggcatcccagaaaagaggccaagaaggcctggcgggattgcctgctgccttacgtgcagagatactgccagatcgtgggcttcattcaccccaacctgagaggcgagcagcagagcatcaactacctgaccgtgtccatgatgaccaacctgaaagtgaacgtgcaagagcacttcatgcagatgctgctgcggtacatcaatctgcgcttcgacgtgaagggccagaagcagagactgcctcctaagagcgacgcccgcaaggcctttttcacccggctgagatacctgaagtccgtgttcctgttcgacgtggtgcccgagctggaattcctggacgatctgacccctctggaaagcgaggtgctggaagagatctggtccctggacctgccttttctgcccaacgatcctctggcctacgccatcgtggccgatcctatgagcttcttcccagcctactgcaagctgagcggcctgtacgagcagtacggcttccagcggtttagcgccattcctctgcggagaagcctgatccagtctcacgtgcggatcgacaccatcatcctgtatcagcacatcctgtgcatcaccagacgggacgccgagacagtggaaaagcgcgacctgtggatgagagtgtgcaacctgcggaccaaagccttccggtccagatgcggcatgcacttcgagggcagcatcacaacagatggcgccagcgtgtccgtgtacctgaaacaccctgaggccgataagtacggcaagagaggcgccagaaagtccgccaatactgtggccgccgaagtgaaggccctgtacgtggaaaacaacctgcctgcctgtagagccgccgagaacgtggtggtcatcgaccccaacaagcgggatatcctgtactgccaggacagcaacggcaccaccttcagatacaccgccaaccagagagccgtggaaaccggcagcagaagattcgccaagcggcgggaagccatgaaggaagaagccggcgttgacctgatcgagagcagaatccctagccacaagaccatgaacctgatggacttcaccagatacctgctcgtgcggagagccgactgggacagacggaaagagttctactctcaccccgctcacacccggtggaagtggcacagcttcatcaaccggcagaagtccgagagcgacctgatcagcaacatgcggaacaaatacggccgcaacttcaccgtggtcatgggcgattggagcgacgctggaagaaccgccagattccagaccagcagcaagaccaaaggctggcggaccctgttcaagcggaaccggatcgattgcttcctgctggacgagtacaagacctccagcgtgtgccctagatgcagcagcagcgagttcgtggaaaagaagttcaagacccggcctcacagcagaccctggcgaagaagagagggcaagatcgagaaggtgcacggcctgctgggctgcaccaatcctaattgtctgcagcaggcctggaccagcggcatgagatactggaaccgggacatgctgagcacatgcaacatgctgctgatcgtgcggtccatgctggatggccatggcagacctgaggtgttctctagatctgtgcctgccgtggcctgactagcataaccccttggggcgcactcctcaggtgcaggctgcctatcagaaggtggtggctggtgtggccaatgccctggctcacaaataccactgagatctttttccctctgccaaaaattatggggacatcatgaagccccttgagcatctgacttctggctaataaaggaaatttattttcattgcaatagtgtgttggaattttttgtgtctctcactcggaaggacatatgggagggcaaatcatttaaaacatcagaatgagtatttggtttagagtttggcaacatatgcccatatgctggctgccatgaacaaaggttggctataaagaggtcatcagtatatgaaacagccccctgctgtccattccttattccatagaaaagccttgacttgaggttagattttttttatattttgttttgtgttatttttttctttaacatccctaaaattttccttacatgttttactagccagatttttcctcctctcctgactactcccagtcatagctgtccctcttctcttatggagatccctcgacctgcagcccaagcttggcgtaatcatggtcatagctgtttcctgtgtgaaattgttatccgctcacaattccacacaacatacgagccggaagcataaagtgtaaagcctggggtgcctaatgagtgagctaactcacattaattgcgttgcgctcactgcccgctttccagtcgggaaacctgtcgtgccagcggatccgcatctcaattagtcagcaaccatagtcccgcccctaactccgcccatcccgcccctaactccgcccagttccgcccattctccgccccatggctgactaattttttttatttatgcagaggccgaggccgcctcggcctctgagctattccagaagtagtgaggaggcttttttggaggcctaggcttttgcaaaaagctaacttgtttattgcagcttataatggttacaaataaagcaatagcatcacaaatttcacaaataaagcatttttttcactgcattctagttgtggtttgtccaaactcatcaatgtatcttatcatgtctggatccgctgcattaatgaatcggccaacgcgcggggagaggcggtttgcgtattgggcgctcttccgcttcctcgctcactgactcgctgcgctcggtcgttcggctgcggcgagcggtatcagctcactcaaaggcggtaatacggttatccacagaatcaggggataacgcaggaaagaacatgtgagcaaaaggccagcaaaaggccaggaaccgtaaaaaggccgcgttgctggcgtttttccataggctccgcccccctgacgagcatcacaaaaatcgacgctcaagtcagaggtggcgaaacccgacaggactataaagataccaggcgtttccccctggaagctccctcgtgcgctctcctgttccgaccctgccgcttaccggatacctgtccgcctttctcccttcgggaagcgtggcgctttctcatagctcacgctgtaggtatctcagttcggtgtaggtcgttcgctccaagctgggctgtgtgcacgaaccccccgttcagcccgaccgctgcgccttatccggtaactatcgtcttgagtccaacccggtaagacacgacttatcgccactggcagcagccactggtaacaggattagcagagcgaggtatgtaggcggtgctacagagttcttgaagtggtggcctaactacggctacactagaagaacagtatttggtatctgcgctctgctgaagccagttaccttcggaaaaagagttggtagctcttgatccggcaaacaaaccaccgctggtagcggtggtttttttgtttgcaagcagcagattacgcgcagaaaaaaaggatctcaagaagatcctttgatcttttctacggggtctgacgctcagtggaacgaaaactcacgttaagggattttggtcatgagattatcaaaaaggatcttcacctagatccttttaaattaaaaatgaagttttaaatcaatctaaagtatatatgagtaaacttggtctgacagttaccaatgcttaatcagtgaggcacctatctcagcgatctgtctatttcgttcatccatagttgcctgactccccgtcgtgtagataactacgatacgggagggcttaccatctggccccagtgctgcaatgataccgcgagacccacgctcaccggctccagatttatcagcaataaaccagccagccggaagggccgagcgcagaagtggtcctgcaactttatccgcctccatccagtctattaattgttgccgggaagctagagtaagtagttcgccagttaatagtttgcgcaacgttgttgccattgctacaggcatcgtggtgtcacgctcgtcgtttggtatggcttcattcagctccggttcccaacgatcaaggcgagttacatgatcccccatgttgtgcaaaaaagcggttagctccttcggtcctccgatcgttgtcagaagtaagttggccgcagtgttatcactcatggttatggcagcactgcataattctcttactgtcatgccatccgtaagatgcttttctgtgactggtgagtactcaaccaagtcattctgagaatagtgtatgcggcgaccgagttgctcttgcccggcgtcaatacgggataataccgcgccacatagcagaactttaaaagtgctcatcattggaaaacgttcttcggggcgaaaactctcaaggatcttaccgctgttgagatccagttcgatgtaacccactcgtgcacccaactgatcttcagcatcttttactttcaccagcgtttctgggtgagcaaaaacaggaaggcaaaatgccgcaaaaaagggaataagggcgacacggaaatgttgaatactcatactcttcctttttcaatattattgaagcatttatcagggttattgtctcatgagcggatacatatttgaatgtatttagaaaaataaacaaataggggttccgcgcacatttccccgaaaagtgccacctgggtcgacattgattattgactagtaatagtaatcaattacggggtcattagttcatagcccatatatggagttccg

SEQ ID NO: 3974 - RNA, 5729 nt, Homo sapiens
  source 1..5729: mol_type = other RNA
cgttacataacttacggtaaatggcccgcctggctgaccgcccaacgacccccgcccattgacgtcaataatgacgtatgttcccatagtaacgccaatagggactttccattgacgtcaatgggtggagtatttacggtaaactgcccacttggcagtacatcaagtgtatcatatgccaagtacgccccctattgacgtcaatgacggtaaatggcccgcctggcattatgcccagtacatgaccttatgggactttcctacttggcagtacatctacgtattagtcatcgctattaccatggtgatgcggttttggcagtacatcaatgggcgtggatagcggtttgactcacggggatttccaagtctccaccccattgacgtcaatgggagtttgttttggcaccaaaatcaacgggactttccaaaatgtcgtaacaactccgccccattgacgcaaatgggcggtaggcgtgtacggtgggaggtctatataagcagagctggtttagtgaaccgtcagatccgctagcgctaccggactcagatcgccaccatgtacccctacgacgtgccagactacgcccctgcggcaaaaaagaaaaagttggacggcggctctggcggcggaggatctggcggaggtggaagcggaggaccgcctaagaagaagcagaagctggaacggctgaagaaactggacaagcccacactgcacacctgtaacaagaccagcttcgccaaggccttcctgcctaacgagacataccggcagcggctgctggactatatcgccatcattcaccagctggccgaccacgcctctcacgccctgaagttttacatcctgagcacctccaccagcagcttccctgtggtgcacgaggataccatcgaggccatcctgtacctgctgaacaagggcgaagcctggcatcccagaaaagaggccaagaaggcctggcgggattgcctgctgccttacgtgcagagatactgccagatcgtgggcttcattcaccccaacctgagaggcgagcagcagagcatcaactacctgaccgtgtccatgatgaccaacctgaaagtgaacgtgcaagagcacttcatgcagatgctgctgcggtacatcaatctgcgcttcgacgtgaagggccagaagcagagactgcctcctaagagcgacgcccgcaaggcctttttcacccggctgagatacctgaagtccgtgttcctgttcgacgtggtgcccgagctggaattcctggacgatctgacccctctggaaagcgaggtgctggaagagatctggtccctggacctgccttttctgcccaacgatcctctggcctacgccatcgtggccgatcctatgagcttcttcccagcctactgcaagctgagcggcctgtacgagcagtacggcttccagcggtttagcgccattcctctgcggagaagcctgatccagtctcacgtgcggatcgacaccatcatcctgtatcagcacatcctgtgcatcaccagacgggacgccgagacagtggaaaagcgcgacctgtggatgagagtgtgcaacctgcggaccaaagccttccggtccagatgcggcatgcacttcgagggcagcatcacaacagatggcgccagcgtgtccgtgtacctgaaacaccctgaggccgataagtacggcaagagaggcgccagaaagtccgccaatactgtggccgccgaagtgaaggccctgtacgtggaaaacaacctgcctgcctgtagagccgccgagaacgtggtggtcatcgaccccaacaagcgggatatcctgtactgccaggacagcaacggcaccaccttcagatacaccgccaaccagagagccgtggaaaccggcagcagaagattcgccaagcggcgggaagccatgaaggaagaagccggcgttgacctgatcgagagcagaatccctagccacaagaccatgaacctgatggacttcaccagatacctgctcgtgcggagagccgactgggacagacggaaagagttctactctcaccccgctcacacccggtggaagtggcacagcttcatcaaccggcagaagtccgagagcgacctgatcagcaacatgcggaacaaatacggcgagaacttcaccgtggtcatgggcgattggagcgacgctggaagaaaggccagattccagaccagcagcaagaccaaaggctggcggaccctgttcaagcggaaccggatcgattgcttcctgctggacgagtacaagacctccagcgtgtgccctagatgcagcagcagcgagttcgtggaaaagaagttcaagacccggcctcacagcagaccctggcgaagaagagagggcaagatcgagaaggtgcacggcctgctgggctgcaccaatcctaattgtctgcagcaggcctggaccagcggcatgagatactggaaccgggacatgctgagcacatgcaacatgctgctgatcgtgcggtccatgctggatggccatggcagacctgaggtgttctctagatctgtgcctgccgtggcctgactagcataaccccttggggcgcactcctcaggtgcaggctgcctatcagaaggtggtggctggtgtggccaatgccctggctcacaaataccactgagatctttttccctctgccaaaaattatggggacatcatgaagccccttgagcatctgacttctggctaataaaggaaatttattttcattgcaatagtgtgttggaattttttgtgtctctcactcggaaggacatatgggagggcaaatcatttaaaacatcagaatgagtatttggtttagagtttggcaacatatgcccatatgctggctgccatgaacaaaggttggctataaagaggtcatcagtatatgaaacagccccctgctgtccattccttattccatagaaaagccttgacttgaggttagattttttttatattttgttttgtgttatttttttctttaacatccctaaaattttccttacatgttttactagccagatttttcctcctctcctgactactcccagtcatagctgtccctcttctcttatggagatccctcgacctgcagcccaagcttggcgtaatcatggtcatagctgtttcctgtgtgaaattgttatccgctcacaattccacacaacatacgagccggaagcataaagtgtaaagcctggggtgcctaatgagtgagctaactcacattaattgcgttgcgctcactgcccgctttccagtcgggaaacctgtcgtgccagcggatccgcatctcaattagtcagcaaccatagtcccgcccctaactccgcccatcccgcccctaactccgcccagttccgcccattctccgccccatggctgactaattttttttatttatgcagaggccgaggccgcctcggcctctgagctattccagaagtagtgaggaggcttttttggaggcctaggcttttgcaaaaagctaacttgtttattgcagcttataatggttacaaataaagcaatagcatcacaaatttcacaaataaagcatttttttcactgcattctagttgtggtttgtccaaactcatcaatgtatcttatcatgtctggatccgctgcattaatgaatcggccaacgcgcggggagaggcggtttgcgtattgggcgctcttccgcttcctcgctcactgactcgctgcgctcggtcgttcggctgcggcgagcggtatcagctcactcaaaggcggtaatacggttatccacagaatcaggggataacgcaggaaagaacatgtgagcaaaaggccagcaaaaggccaggaaccgtaaaaaggccgcgttgctggcgtttttccataggctccgcccccctgacgagcatcacaaaaatcgacgctcaagtcagaggtggcgaaacccgacaggactataaagataccaggcgtttccccctggaagctccctcgtgcgctctcctgttccgaccctgccgcttaccggatacctgtccgcctttctcccttcgggaagcgtggcgctttctcatagctcacgctgtaggtatctcagttcggtgtaggtcgttcgctccaagctgggctgtgtgcacgaaccccccgttcagcccgaccgctgcgccttatccggtaactatcgtcttgagtccaacccggtaagacacgacttatcgccactggcagcagccactggtaacaggattagcagagcgaggtatgtaggcggtgctacagagttcttgaagtggtggcctaactacggctacactagaagaacagtatttggtatctgcgctctgctgaagccagttaccttcggaaaaagagttggtagctcttgatccggcaaacaaaccaccgctggtagcggtggtttttttgtttgcaagcagcagattacgcgcagaaaaaaaggatctcaagaagatcctttgatcttttctacggggtctgacgctcagtggaacgaaaactcacgttaagggattttggtcatgagattatcaaaaaggatcttcacctagatccttttaaattaaaaatgaagttttaaatcaatctaaagtatatatgagtaaacttggtctgacagttaccaatgcttaatcagtgaggcacctatctcagcgatctgtctatttcgttcatccatagttgcctgactccccgtcgtgtagataactacgatacgggagggcttaccatctggccccagtgctgcaatgataccgcgagacccacgctcaccggctccagatttatcagcaataaaccagccagccggaagggccgagcgcagaagtggtcctgcaactttatccgcctccatccagtctattaattgttgccgggaagctagagtaagtagttcgccagttaatagtttgcgcaacgttgttgccattgctacaggcatcgtggtgtcacgctcgtcgtttggtatggcttcattcagctccggttcccaacgatcaaggcgagttacatgatcccccatgttgtgcaaaaaagcggttagctccttcggtcctccgatcgttgtcagaagtaagttggccgcagtgttatcactcatggttatggcagcactgcataattctcttactgtcatgccatccgtaagatgcttttctgtgactggtgagtactcaaccaagtcattctgagaatagtgtatgcggcgaccgagttgctcttgcccggcgtcaatacgggataataccgcgccacatagcagaactttaaaagtgctcatcattggaaaacgttcttcggggcgaaaactctcaaggatcttaccgctgttgagatccagttcgatgtaacccactcgtgcacccaactgatcttcagcatcttttactttcaccagcgtttctgggtgagcaaaaacaggaaggcaaaatgccgcaaaaaagggaataagggcgacacggaaatgttgaatactcatactcttcctttttcaatattattgaagcatttatcagggttattgtctcatgagcggatacatatttgaatgtatttagaaaaataaacaaataggggttccgcgcacatttccccgaaaagtgccacctgggtcgacattgattattgactagtaatagtaatcaattacggggtcattagttcatagcccatatatggagttccg

SEQ ID NO: 3975 - RNA, 5729 nt, Homo sapiens
  source 1..5729: mol_type = other RNA
cgttacataacttacggtaaatggcccgcctggctgaccgcccaacgacccccgcccattgacgtcaataatgacgtatgttcccatagtaacgccaatagggactttccattgacgtcaatgggtggagtatttacggtaaactgcccacttggcagtacatcaagtgtatcatatgccaagtacgccccctattgacgtcaatgacggtaaatggcccgcctggcattatgcccagtacatgaccttatgggactttcctacttggcagtacatctacgtattagtcatcgctattaccatggtgatgcggttttggcagtacatcaatgggcgtggatagcggtttgactcacggggatttccaagtctccaccccattgacgtcaatgggagtttgttttggcaccaaaatcaacgggactttccaaaatgtcgtaacaactccgccccattgacgcaaatgggcggtaggcgtgtacggtgggaggtctatataagcagagctggtttagtgaaccgtcagatccgctagcgctaccggactcagatcgccaccatgtacccctacgacgtgccagactacgcccctgcggcaaaaaagaaaaagttggacggcggctctggcggcggaggatctggcggaggtggaagcggaggaccgcctaagaagaagcagaagctggaacggctgaagaaactggacaagcccacactgcacacctgtaacaagaccagcttcgccaaggccttcctgcctaacgagacataccggcagcggctgctggactatatcgccatcattcaccagctggccgaccacgcctctcacgccctgaagttttacatcctgagcacctccaccagcagcttccctgtggtgcacgaggataccatcgaggccatcctgtacctgctgaacaagggcgaagcctggcatcccagaaaagaggccaagaaggcctggcgggattgcctgctgccttacgtgcagagatactgccagatcgtgggcttcattcaccccaacctgagaggcgagcagcagagcatcaactacctgaccgtgtccatgatgaccaacctgaaagtgaacgtgcaagagcacttcatgcagatgctgctgcggtacatcaatctgcgcttcgacgtgaagggccagaagcagagactgcctcctaagagcgacgcccgcaaggcctttttcacccggctgagatacctgaagtccgtgttcctgttcgacgtggtgcccgagctggaattcctggacgatctgacccctctggaaagcgaggtgctggaagagatctggtccctggacctgccttttctgcccaacgatcctctggcctacgccatcgtggccgatcctatgagcttcttcccagcctactgcaagctgagcggcctgtacgagcagtacggcttccagcggtttagcgccattcctctgcggagaagcctgatccagtctcacgtgcggatcgacaccatcatcctgtatcagcacatcctgtgcatcaccagacgggacgccgagacagtggaaaagcgcgacctgtggatgagagtgtgcaacctgtgcaccaaagccttccggtccagatgcggcatgcacttcgagggcagcatcacaacagatggcgccagcgtgtccgtgtacctgaaacaccctgaggccgataagtacggcaagagaggcgccagaaagtccgccaatactgtggccgccgaagtgaaggccctgtacgtggaaaacaacctgcctgcctgtagagccgccgagaacgtggtggtcatcgaccccaacaagcgggatatcctgtactgccaggacagcaacggcaccaccttcagatacaccgccaaccagagagccgtggaaaccggcagcagaagattcgccaagcggcgggaagccatgaaggaagaagccggcgttgacctgatcgagagcagaatccctagccacaagaccatgaacctgatggacttcaccagatacctgctcgtgcggagagccgactgggacagacggaaagagttctactctcaccccgctcacacccggtggaagtggcacagcttcatcaaccggcagaagtccgagagcaagctgatcagcaacatgcggaacaaatacggccgcaacttcaccgtggtcatgggcgattggagcgacgctggaagaaccgccagattccagaccagcagcaagaccaaaggctggcggaccctgttcaagcggaaccggatcgattgcttcctgctggacgagtacaagacctccagcgtgtgccctagatgcagcagcagcgagttcgtggaaaagaagttcaagacccggcctcacagcagaccctggcgaagaagagagggcaagatcgagaaggtgcacggcctgctgggctgcaccaatcctaattgtctgcagcaggcctggaccagcggcatgagatactggaaccgggacatgctgagcacatgcaacatgctgctgatcgtgcggtccatgctggatggccatggcagacctgaggtgttctctagatctgtgcctgccgtggcctgactagcataaccccttggggcgcactcctcaggtgcaggctgcctatcagaaggtggtggctggtgtggccaatgccctggctcacaaataccactgagatctttttccctctgccaaaaattatggggacatcatgaagccccttgagcatctgacttctggctaataaaggaaatttattttcattgcaatagtgtgttggaattttttgtgtctctcactcggaaggacatatgggagggcaaatcatttaaaacatcagaatgagtatttggtttagagtttggcaacatatgcccatatgctggctgccatgaacaaaggttggctataaagaggtcatcagtatatgaaacagccccctgctgtccattccttattccatagaaaagccttgacttgaggttagattttttttatattttgttttgtgttatttttttctttaacatccctaaaattttccttacatgttttactagccagatttttcctcctctcctgactactcccagtcatagctgtccctcttctcttatggagatccctcgacctgcagcccaagcttggcgtaatcatggtcatagctgtttcctgtgtgaaattgttatccgctcacaattccacacaacatacgagccggaagcataaagtgtaaagcctggggtgcctaatgagtgagctaactcacattaattgcgttgcgctcactgcccgctttccagtcgggaaacctgtcgtgccagcggatccgcatctcaattagtcagcaaccatagtcccgcccctaactccgcccatcccgcccctaactccgcccagttccgcccattctccgccccatggctgactaattttttttatttatgcagaggccgaggccgcctcggcctctgagctattccagaagtagtgaggaggcttttttggaggcctaggcttttgcaaaaagctaacttgtttattgcagcttataatggttacaaataaagcaatagcatcacaaatttcacaaataaagcatttttttcactgcattctagttgtggtttgtccaaactcatcaatgtatcttatcatgtctggatccgctgcattaatgaatcggccaacgcgcggggagaggcggtttgcgtattgggcgctcttccgcttcctcgctcactgactcgctgcgctcggtcgttcggctgcggcgagcggtatcagctcactcaaaggcggtaatacggttatccacagaatcaggggataacgcaggaaagaacatgtgagcaaaaggccagcaaaaggccaggaaccgtaaaaaggccgcgttgctggcgtttttccataggctccgcccccctgacgagcatcacaaaaatcgacgctcaagtcagaggtggcgaaacccgacaggactataaagataccaggcgtttccccctggaagctccctcgtgcgctctcctgttccgaccctgccgcttaccggatacctgtccgcctttctcccttcgggaagcgtggcgctttctcatagctcacgctgtaggtatctcagttcggtgtaggtcgttcgctccaagctgggctgtgtgcacgaaccccccgttcagcccgaccgctgcgccttatccggtaactatcgtcttgagtccaacccggtaagacacgacttatcgccactggcagcagccactggtaacaggattagcagagcgaggtatgtaggcggtgctacagagttcttgaagtggtggcctaactacggctacactagaagaacagtatttggtatctgcgctctgctgaagccagttaccttcggaaaaagagttggtagctcttgatccggcaaacaaaccaccgctggtagcggtggtttttttgtttgcaagcagcagattacgcgcagaaaaaaaggatctcaagaagatcctttgatcttttctacggggtctgacgctcagtggaacgaaaactcacgttaagggattttggtcatgagattatcaaaaaggatcttcacctagatccttttaaattaaaaatgaagttttaaatcaatctaaagtatatatgagtaaacttggtctgacagttaccaatgcttaatcagtgaggcacctatctcagcgatctgtctatttcgttcatccatagttgcctgactccccgtcgtgtagataactacgatacgggagggcttaccatctggccccagtgctgcaatgataccgcgagacccacgctcaccggctccagatttatcagcaataaaccagccagccggaagggccgagcgcagaagtggtcctgcaactttatccgcctccatccagtctattaattgttgccgggaagctagagtaagtagttcgccagttaatagtttgcgcaacgttgttgccattgctacaggcatcgtggtgtcacgctcgtcgtttggtatggcttcattcagctccggttcccaacgatcaaggcgagttacatgatcccccatgttgtgcaaaaaagcggttagctccttcggtcctccgatcgttgtcagaagtaagttggccgcagtgttatcactcatggttatggcagcactgcataattctcttactgtcatgccatccgtaagatgcttttctgtgactggtgagtactcaaccaagtcattctgagaatagtgtatgcggcgaccgagttgctcttgcccggcgtcaatacgggataataccgcgccacatagcagaactttaaaagtgctcatcattggaaaacgttcttcggggcgaaaactctcaaggatcttaccgctgttgagatccagttcgatgtaacccactcgtgcacccaactgatcttcagcatcttttactttcaccagcgtttctgggtgagcaaaaacaggaaggcaaaatgccgcaaaaaagggaataagggcgacacggaaatgttgaatactcatactcttcctttttcaatattattgaagcatttatcagggttattgtctcatgagcggatacatatttgaatgtatttagaaaaataaacaaataggggttccgcgcacatttccccgaaaagtgccacctgggtcgacattgattattgactagtaatagtaatcaattacggggtcattagttcatagcccatatatggagttccg

SEQ ID NO: 3976 - RNA, 5729 nt, Homo sapiens
  source 1..5729: mol_type = other RNA
cgttacataacttacggtaaatggcccgcctggctgaccgcccaacgacccccgcccattgacgtcaataatgacgtatgttcccatagtaacgccaatagggactttccattgacgtcaatgggtggagtatttacggtaaactgcccacttggcagtacatcaagtgtatcatatgccaagtacgccccctattgacgtcaatgacggtaaatggcccgcctggcattatgcccagtacatgaccttatgggactttcctacttggcagtacatctacgtattagtcatcgctattaccatggtgatgcggttttggcagtacatcaatgggcgtggatagcggtttgactcacggggatttccaagtctccaccccattgacgtcaatgggagtttgttttggcaccaaaatcaacgggactttccaaaatgtcgtaacaactccgccccattgacgcaaatgggcggtaggcgtgtacggtgggaggtctatataagcagagctggtttagtgaaccgtcagatccgctagcgctaccggactcagatcgccaccatgtacccctacgacgtgccagactacgcccctgcggcaaaaaagaaaaagttggacggcggctctggcggcggaggatctggcggaggtggaagcggaggaccgcctaagaagaagcagaagctggaacggctgaagaaactggacaagcccacactgcacacctgtaacaagaccagcttcgccaaggccttcctgcctaacgagacataccggcagcggctgctggactatatcgccatcattcaccagctggccgaccacgcctctcacgccctgaagttttacatcctgagcacctccaccagcagcttccctgtggtgcacgaggataccatcgaggccatcctgtacctgctgaacaagggcgaagcctggcatcccagaaaagaggccaagaaggcctggcgggattgcctgctgccttacgtgcagagatactgccagatcgtgggcttcattcaccccaacctgagaggcgagcagcagagcatcaactacctgaccgtgtccatgatgaccaacctgaaagtgaacgtgcaagagcacttcatgcagatgctgctgcggtacatcaatctgcgcttcgacgtgaagggccagaagcagagactgcctcctaagagcgacgcccgcaaggcctttttcacccggctgagatacctgaagtccgtgttcctgttcgacgtggtgcccgagctggaattcctggacgatctgacccctctggaaagcgaggtgctggaagagatctggtccctggacctgccttttctgcccaacgatcctctggcctacgccatcgtggccgatcctatgagcttcttcccagcctactgcaagctgagcggcctgtacgagcagtacggcttccagcggtttagcgccattcctctgcggagaagcctgatccagtctcacgtgcggatcgacaccatcatcctgtatcagcacatcctgtgcatcaccagacgggacgccgagacagtggaaaagcgcgacctgtggatgagagtgtgcaacctgtgcaccaaagccttccggtccagatgcggcatgcacttcgagggcagcatcacaacagatggcgccagcgtgtccgtgtacctgaaacaccctgaggccgataagtacggcaagagaggcgccagaaagtccgccaatactgtggccgccgaagtgaaggccctgtacgtggaaaacaacctgcctgcctgtagagccgccgagaacgtggtggtcatcgaccccaacaagcgggatatcctgtactgccaggacagcaacggcaccaccttcagatacaccgccaaccagagagccgtggaaaccggcagcagaagattcgccaagcggcgggaagccatgaaggaagaagccggcgttgacctgatcgagagcagaatccctagccacaagaccatgaacctgatggacttcaccagatacctgctcgtgcggagagccgactgggacagacggaaagagttctactctcaccccgctcacacccggtggaagtggcacagcttcatcaaccggcagaagtccgagagcaagctgatcagcaacatgcggaacaaatacggcgagaacttcaccgtggtcatgggcgattggagcgacgctggaagaaaggccagattccagaccagcagcaagaccaaaggctggcggaccctgttcaagcggaaccggatcgattgcttcctgctggacgagtacaagacctccagcgtgtgccctagatgcagcagcagcgagttcgtggaaaagaagttcaagacccggcctcacagcagaccctggcgaagaagagagggcaagatcgagaaggtgcacggcctgctgggctgcaccaatcctaattgtctgcagcaggcctggaccagcggcatgagatactggaaccgggacatgctgagcacatgcaacatgctgctgatcgtgcggtccatgctggatggccatggcagacctgaggtgttctctagatctgtgcctgccgtggcctgactagcataaccccttggggcgcactcctcaggtgcaggctgcctatcagaaggtggtggctggtgtggccaatgccctggctcacaaataccactgagatctttttccctctgccaaaaattatggggacatcatgaagccccttgagcatctgacttctggctaataaaggaaatttattttcattgcaatagtgtgttggaattttttgtgtctctcactcggaaggacatatgggagggcaaatcatttaaaacatcagaatgagtatttggtttagagtttggcaacatatgcccatatgctggctgccatgaacaaaggttggctataaagaggtcatcagtatatgaaacagccccctgctgtccattccttattccatagaaaagccttgacttgaggttagattttttttatattttgttttgtgttatttttttctttaacatccctaaaattttccttacatgttttactagccagatttttcctcctctcctgactactcccagtcatagctgtccctcttctcttatggagatccctcgacctgcagcccaagcttggcgtaatcatggtcatagctgtttcctgtgtgaaattgttatccgctcacaattccacacaacatacgagccggaagcataaagtgtaaagcctggggtgcctaatgagtgagctaactcacattaattgcgttgcgctcactgcccgctttccagtcgggaaacctgtcgtgccagcggatccgcatctcaattagtcagcaaccatagtcccgcccctaactccgcccatcccgcccctaactccgcccagttccgcccattctccgccccatggctgactaattttttttatttatgcagaggccgaggccgcctcggcctctgagctattccagaagtagtgaggaggcttttttggaggcctaggcttttgcaaaaagctaacttgtttattgcagcttataatggttacaaataaagcaatagcatcacaaatttcacaaataaagcatttttttcactgcattctagttgtggtttgtccaaactcatcaatgtatcttatcatgtctggatccgctgcattaatgaatcggccaacgcgcggggagaggcggtttgcgtattgggcgctcttccgcttcctcgctcactgactcgctgcgctcggtcgttcggctgcggcgagcggtatcagctcactcaaaggcggtaatacggttatccacagaatcaggggataacgcaggaaagaacatgtgagcaaaaggccagcaaaaggccaggaaccgtaaaaaggccgcgttgctggcgtttttccataggctccgcccccctgacgagcatcacaaaaatcgacgctcaagtcagaggtggcgaaacccgacaggactataaagataccaggcgtttccccctggaagctccctcgtgcgctctcctgttccgaccctgccgcttaccggatacctgtccgcctttctcccttcgggaagcgtggcgctttctcatagctcacgctgtaggtatctcagttcggtgtaggtcgttcgctccaagctgggctgtgtgcacgaaccccccgttcagcccgaccgctgcgccttatccggtaactatcgtcttgagtccaacccggtaagacacgacttatcgccactggcagcagccactggtaacaggattagcagagcgaggtatgtaggcggtgctacagagttcttgaagtggtggcctaactacggctacactagaagaacagtatttggtatctgcgctctgctgaagccagttaccttcggaaaaagagttggtagctcttgatccggcaaacaaaccaccgctggtagcggtggtttttttgtttgcaagcagcagattacgcgcagaaaaaaaggatctcaagaagatcctttgatcttttctacggggtctgacgctcagtggaacgaaaactcacgttaagggattttggtcatgagattatcaaaaaggatcttcacctagatccttttaaattaaaaatgaagttttaaatcaatctaaagtatatatgagtaaacttggtctgacagttaccaatgcttaatcagtgaggcacctatctcagcgatctgtctatttcgttcatccatagttgcctgactccccgtcgtgtagataactacgatacgggagggcttaccatctggccccagtgctgcaatgataccgcgagacccacgctcaccggctccagatttatcagcaataaaccagccagccggaagggccgagcgcagaagtggtcctgcaactttatccgcctccatccagtctattaattgttgccgggaagctagagtaagtagttcgccagttaatagtttgcgcaacgttgttgccattgctacaggcatcgtggtgtcacgctcgtcgtttggtatggcttcattcagctccggttcccaacgatcaaggcgagttacatgatcccccatgttgtgcaaaaaagcggttagctccttcggtcctccgatcgttgtcagaagtaagttggccgcagtgttatcactcatggttatggcagcactgcataattctcttactgtcatgccatccgtaagatgcttttctgtgactggtgagtactcaaccaagtcattctgagaatagtgtatgcggcgaccgagttgctcttgcccggcgtcaatacgggataataccgcgccacatagcagaactttaaaagtgctcatcattggaaaacgttcttcggggcgaaaactctcaaggatcttaccgctgttgagatccagttcgatgtaacccactcgtgcacccaactgatcttcagcatcttttactttcaccagcgtttctgggtgagcaaaaacaggaaggcaaaatgccgcaaaaaagggaataagggcgacacggaaatgttgaatactcatactcttcctttttcaatattattgaagcatttatcagggttattgtctcatgagcggatacatatttgaatgtatttagaaaaataaacaaataggggttccgcgcacatttccccgaaaagtgccacctgggtcgacattgattattgactagtaatagtaatcaattacggggtcattagttcatagcccatatatggagttccg

SEQ ID NO: 3977 - RNA, 5729 nt, Homo sapiens
  source 1..5729: mol_type = other RNA
cgttacataacttacggtaaatggcccgcctggctgaccgcccaacgacccccgcccattgacgtcaataatgacgtatgttcccatagtaacgccaatagggactttccattgacgtcaatgggtggagtatttacggtaaactgcccacttggcagtacatcaagtgtatcatatgccaagtacgccccctattgacgtcaatgacggtaaatggcccgcctggcattatgcccagtacatgaccttatgggactttcctacttggcagtacatctacgtattagtcatcgctattaccatggtgatgcggttttggcagtacatcaatgggcgtggatagcggtttgactcacggggatttccaagtctccaccccattgacgtcaatgggagtttgttttggcaccaaaatcaacgggactttccaaaatgtcgtaacaactccgccccattgacgcaaatgggcggtaggcgtgtacggtgggaggtctatataagcagagctggtttagtgaaccgtcagatccgctagcgctaccggactcagatcgccaccatgtacccctacgacgtgccagactacgcccctgcggcaaaaaagaaaaagttggacggcggctctggcggcggaggatctggcggaggtggaagcggaggaccgcctaagaagaagcagaagctggaacggctgaagaaactggacaagcccacactgcacacctgtaacaagaccagcttcgccaaggccttcctgcctaacgagacataccggcagcggctgctggactatatcgccatcattcaccagctggccgaccacgcctctcacgccctgaagttttacatcctgagcacctccaccagcagcttccctgtggtgcacgaggataccatcgaggccatcctgtacctgctgaacaagggcgaagcctggcatcccagaaaagaggccaagaaggcctggcgggattgcctgctgccttacgtgcagagatactgccagatcgtgggcttcattcaccccaacctgagaggcgagcagcagagcatcaactacctgaccgtgtccatgatgaccaacctgaaagtgaacgtgcaagagcacttcatgcagatgctgctgcggtacatcaatctgcgcttcgacgtgaagggccagaagcagagactgcctcctaagagcgacgcccgcaaggcctttttcacccggctgagatacctgaagtccgtgttcctgttcgacgtggtgcccgagctggaattcctggacgatctgacccctctggaaagcgaggtgctggaagagatctggtccctggacctgccttttctgcccaacgatcctctggcctacgccatcgtggccgatcctatgagcttcttcccagcctactgcaagctgagcggcctgtacgagcagtacggcttccagcggtttagcgccattcctctgcggagaagcctgatccagtctcacgtgcggatcgacaccatcatcctgtatcagcacatcctgtgcatcaccagacgggacgccgagacagtggaaaagcgcgacctgtggatgagagtgtgcaacctgtgcaccaaagccttccggtccagatgcggcatgcacttcgagggcagcatcacaacagatggcgccagcgtgtccgtgtacctgaaacaccctgaggccgataagtacggcaagagaggcgccagaaagtccgccaatactgtggccgccgaagtgaaggccctgtacgtggaaaacaacctgcctgcctgtagagccgccgagaacgtggtggtcatcgaccccaacaagcgggatatcctgtactgccaggacagcaacggcaccaccttcagatacaccgccaaccagagagccgtggaaaccggcagcagaagattcgccaagcggcgggaagccatgaaggaagaagccggcgttgacctgatcgagagcagaatccctagccacaagaccatgaacctgatggacttcaccagatacctgctcgtgcggagagccgactgggacagacggaaagagttctactctcaccccgctcacacccggtggaagtggcacagcttcatcaaccggcagaagtccgagagcgacctgatcagcaacatgcggaacaaatacggccgcaacttcaccgtggtcatgggcgattggagcgacgctggaagaaaggccagattccagaccagcagcaagaccaaaggctggcggaccctgttcaagcggaaccggatcgattgcttcctgctggacgagtacaagacctccagcgtgtgccctagatgcagcagcagcgagttcgtggaaaagaagttcaagacccggcctcacagcagaccctggcgaagaagagagggcaagatcgagaaggtgcacggcctgctgggctgcaccaatcctaattgtctgcagcaggcctggaccagcggcatgagatactggaaccgggacatgctgagcacatgcaacatgctgctgatcgtgcggtccatgctggatggccatggcagacctgaggtgttctctagatctgtgcctgccgtggcctgactagcataaccccttggggcgcactcctcaggtgcaggctgcctatcagaaggtggtggctggtgtggccaatgccctggctcacaaataccactgagatctttttccctctgccaaaaattatggggacatcatgaagccccttgagcatctgacttctggctaataaaggaaatttattttcattgcaatagtgtgttggaattttttgtgtctctcactcggaaggacatatgggagggcaaatcatttaaaacatcagaatgagtatttggtttagagtttggcaacatatgcccatatgctggctgccatgaacaaaggttggctataaagaggtcatcagtatatgaaacagccccctgctgtccattccttattccatagaaaagccttgacttgaggttagattttttttatattttgttttgtgttatttttttctttaacatccctaaaattttccttacatgttttactagccagatttttcctcctctcctgactactcccagtcatagctgtccctcttctcttatggagatccctcgacctgcagcccaagcttggcgtaatcatggtcatagctgtttcctgtgtgaaattgttatccgctcacaattccacacaacatacgagccggaagcataaagtgtaaagcctggggtgcctaatgagtgagctaactcacattaattgcgttgcgctcactgcccgctttccagtcgggaaacctgtcgtgccagcggatccgcatctcaattagtcagcaaccatagtcccgcccctaactccgcccatcccgcccctaactccgcccagttccgcccattctccgccccatggctgactaattttttttatttatgcagaggccgaggccgcctcggcctctgagctattccagaagtagtgaggaggcttttttggaggcctaggcttttgcaaaaagctaacttgtttattgcagcttataatggttacaaataaagcaatagcatcacaaatttcacaaataaagcatttttttcactgcattctagttgtggtttgtccaaactcatcaatgtatcttatcatgtctggatccgctgcattaatgaatcggccaacgcgcggggagaggcggtttgcgtattgggcgctcttccgcttcctcgctcactgactcgctgcgctcggtcgttcggctgcggcgagcggtatcagctcactcaaaggcggtaatacggttatccacagaatcaggggataacgcaggaaagaacatgtgagcaaaaggccagcaaaaggccaggaaccgtaaaaaggccgcgttgctggcgtttttccataggctccgcccccctgacgagcatcacaaaaatcgacgctcaagtcagaggtggcgaaacccgacaggactataaagataccaggcgtttccccctggaagctccctcgtgcgctctcctgttccgaccctgccgcttaccggatacctgtccgcctttctcccttcgggaagcgtggcgctttctcatagctcacgctgtaggtatctcagttcggtgtaggtcgttcgctccaagctgggctgtgtgcacgaaccccccgttcagcccgaccgctgcgccttatccggtaactatcgtcttgagtccaacccggtaagacacgacttatcgccactggcagcagccactggtaacaggattagcagagcgaggtatgtaggcggtgctacagagttcttgaagtggtggcctaactacggctacactagaagaacagtatttggtatctgcgctctgctgaagccagttaccttcggaaaaagagttggtagctcttgatccggcaaacaaaccaccgctggtagcggtggtttttttgtttgcaagcagcagattacgcgcagaaaaaaaggatctcaagaagatcctttgatcttttctacggggtctgacgctcagtggaacgaaaactcacgttaagggattttggtcatgagattatcaaaaaggatcttcacctagatccttttaaattaaaaatgaagttttaaatcaatctaaagtatatatgagtaaacttggtctgacagttaccaatgcttaatcagtgaggcacctatctcagcgatctgtctatttcgttcatccatagttgcctgactccccgtcgtgtagataactacgatacgggagggcttaccatctggccccagtgctgcaatgataccgcgagacccacgctcaccggctccagatttatcagcaataaaccagccagccggaagggccgagcgcagaagtggtcctgcaactttatccgcctccatccagtctattaattgttgccgggaagctagagtaagtagttcgccagttaatagtttgcgcaacgttgttgccattgctacaggcatcgtggtgtcacgctcgtcgtttggtatggcttcattcagctccggttcccaacgatcaaggcgagttacatgatcccccatgttgtgcaaaaaagcggttagctccttcggtcctccgatcgttgtcagaagtaagttggccgcagtgttatcactcatggttatggcagcactgcataattctcttactgtcatgccatccgtaagatgcttttctgtgactggtgagtactcaaccaagtcattctgagaatagtgtatgcggcgaccgagttgctcttgcccggcgtcaatacgggataataccgcgccacatagcagaactttaaaagtgctcatcattggaaaacgttcttcggggcgaaaactctcaaggatcttaccgctgttgagatccagttcgatgtaacccactcgtgcacccaactgatcttcagcatcttttactttcaccagcgtttctgggtgagcaaaaacaggaaggcaaaatgccgcaaaaaagggaataagggcgacacggaaatgttgaatactcatactcttcctttttcaatattattgaagcatttatcagggttattgtctcatgagcggatacatatttgaatgtatttagaaaaataaacaaataggggttccgcgcacatttccccgaaaagtgccacctgggtcgacattgattattgactagtaatagtaatcaattacggggtcattagttcatagcccatatatggagttccg

SEQ ID NO: 3978 - RNA, 5729 nt, Homo sapiens
  source 1..5729: mol_type = other RNA
cgttacataacttacggtaaatggcccgcctggctgaccgcccaacgacccccgcccattgacgtcaataatgacgtatgttcccatagtaacgccaatagggactttccattgacgtcaatgggtggagtatttacggtaaactgcccacttggcagtacatcaagtgtatcatatgccaagtacgccccctattgacgtcaatgacggtaaatggcccgcctggcattatgcccagtacatgaccttatgggactttcctacttggcagtacatctacgtattagtcatcgctattaccatggtgatgcggttttggcagtacatcaatgggcgtggatagcggtttgactcacggggatttccaagtctccaccccattgacgtcaatgggagtttgttttggcaccaaaatcaacgggactttccaaaatgtcgtaacaactccgccccattgacgcaaatgggcggtaggcgtgtacggtgggaggtctatataagcagagctggtttagtgaaccgtcagatccgctagcgctaccggactcagatcgccaccatgtacccctacgacgtgccagactacgcccctgcggcaaaaaagaaaaagttggacggcggctctggcggcggaggatctggcggaggtggaagcggaggaccgcctaagaagaagcagaagctggaacggctgaagaaactggacaagcccacactgcacacctgtaacaagaccagcttcgccaaggccttcctgcctaacgagacataccggcagcggctgctggactatatcgccatcattcaccagctggccgaccacgcctctcacgccctgaagttttacatcctgagcacctccaccagcagcttccctgtggtgcacgaggataccatcgaggccatcctgtacctgctgaacaagggcgaagcctggcatcccagaaaagaggccaagaaggcctggcgggattgcctgctgccttacgtgcagagatactgccagatcgtgggcttcattcaccccaacctgagaggcgagcagcagagcatcaactacctgaccgtgtccatgatgaccaacctgaaagtgaacgtgcaagagcacttcatgcagatgctgctgcggtacatcaatctgcgcttcgacgtgaagggccagaagcagagactgcctcctaagagcgacgcccgcaaggcctttttcacccggctgagatacctgaagtccgtgttcctgttcgacgtggtgcccgagctggaattcctggacgatctgacccctctggaaagcgaggtgctggaagagatctggtccctggacctgccttttctgcccaacgatcctctggcctacgccatcgtggccgatcctatgagcttcttcccagcctactgcaagctgagcggcctgtacgagcagtacggcttccagcggtttagcgccattcctctgcggagaagcctgatccagtctcacgtgcggatcgacaccatcatcctgtatcagcacatcctgtgcatcaccagacgggacgccgagacagtggaaaaggacgacctgtggatgagagtgtgcaacctgcggaccaaagccttccggtccagatgcggcatgcacttcgagggcagcatcacaacagatggcgccagcgtgtccgtgtacctgaaacaccctgaggccgataagtacggcaagagaggcgccagaaagtccgccaatactgtggccgccgaagtgaaggccctgtacgtggaaaacaacctgcctgcctgtagagccgccgagaacgtggtggtcatcgaccccaacaagcgggatatcctgtactgccaggacagcaacggcaccaccttcagatacaccgccaaccagagagccgtggaaaccggcagcagaagattcgccaagcggcgggaagccatgaaggaagaagccggcgttgacctgatcgagagcagaatccctagccacaagaccatgaacctgatggacttcaccagatacctgctcgtgcggagagccgactgggacagacggaaagagttctactctcaccccgctcacacccggtggaagtggcacagcttcatcaaccggcagaagtccgagagcaagctgatcagcaacatgcggaacaaatacggccgcaacttcaccgtggtcatgggcgattggagcgacgctggaagaaccgccagattccagaccagcagcaagaccaaaggctggcggaccctgttcaagcggaaccggatcgattgcttcctgctggacgagtacaagacctccagcgtgtgccctagatgcagcagcagcgagttcgtggaaaagaagttcaagacccggcctcacagcagaccctggcgaagaagagagggcaagatcgagaaggtgcacggcctgctgggctgcaccaatcctaattgtctgcagcaggcctggaccagcggcatgagatactggaaccgggacatgctgagcacatgcaacatgctgctgatcgtgcggtccatgctggatggccatggcagacctgaggtgttctctagatctgtgcctgccgtggcctgactagcataaccccttggggcgcactcctcaggtgcaggctgcctatcagaaggtggtggctggtgtggccaatgccctggctcacaaataccactgagatctttttccctctgccaaaaattatggggacatcatgaagccccttgagcatctgacttctggctaataaaggaaatttattttcattgcaatagtgtgttggaattttttgtgtctctcactcggaaggacatatgggagggcaaatcatttaaaacatcagaatgagtatttggtttagagtttggcaacatatgcccatatgctggctgccatgaacaaaggttggctataaagaggtcatcagtatatgaaacagccccctgctgtccattccttattccatagaaaagccttgacttgaggttagattttttttatattttgttttgtgttatttttttctttaacatccctaaaattttccttacatgttttactagccagatttttcctcctctcctgactactcccagtcatagctgtccctcttctcttatggagatccctcgacctgcagcccaagcttggcgtaatcatggtcatagctgtttcctgtgtgaaattgttatccgctcacaattccacacaacatacgagccggaagcataaagtgtaaagcctggggtgcctaatgagtgagctaactcacattaattgcgttgcgctcactgcccgctttccagtcgggaaacctgtcgtgccagcggatccgcatctcaattagtcagcaaccatagtcccgcccctaactccgcccatcccgcccctaactccgcccagttccgcccattctccgccccatggctgactaattttttttatttatgcagaggccgaggccgcctcggcctctgagctattccagaagtagtgaggaggcttttttggaggcctaggcttttgcaaaaagctaacttgtttattgcagcttataatggttacaaataaagcaatagcatcacaaatttcacaaataaagcatttttttcactgcattctagttgtggtttgtccaaactcatcaatgtatcttatcatgtctggatccgctgcattaatgaatcggccaacgcgcggggagaggcggtttgcgtattgggcgctcttccgcttcctcgctcactgactcgctgcgctcggtcgttcggctgcggcgagcggtatcagctcactcaaaggcggtaatacggttatccacagaatcaggggataacgcaggaaagaacatgtgagcaaaaggccagcaaaaggccaggaaccgtaaaaaggccgcgttgctggcgtttttccataggctccgcccccctgacgagcatcacaaaaatcgacgctcaagtcagaggtggcgaaacccgacaggactataaagataccaggcgtttccccctggaagctccctcgtgcgctctcctgttccgaccctgccgcttaccggatacctgtccgcctttctcccttcgggaagcgtggcgctttctcatagctcacgctgtaggtatctcagttcggtgtaggtcgttcgctccaagctgggctgtgtgcacgaaccccccgttcagcccgaccgctgcgccttatccggtaactatcgtcttgagtccaacccggtaagacacgacttatcgccactggcagcagccactggtaacaggattagcagagcgaggtatgtaggcggtgctacagagttcttgaagtggtggcctaactacggctacactagaagaacagtatttggtatctgcgctctgctgaagccagttaccttcggaaaaagagttggtagctcttgatccggcaaacaaaccaccgctggtagcggtggtttttttgtttgcaagcagcagattacgcgcagaaaaaaaggatctcaagaagatcctttgatcttttctacggggtctgacgctcagtggaacgaaaactcacgttaagggattttggtcatgagattatcaaaaaggatcttcacctagatccttttaaattaaaaatgaagttttaaatcaatctaaagtatatatgagtaaacttggtctgacagttaccaatgcttaatcagtgaggcacctatctcagcgatctgtctatttcgttcatccatagttgcctgactccccgtcgtgtagataactacgatacgggagggcttaccatctggccccagtgctgcaatgataccgcgagacccacgctcaccggctccagatttatcagcaataaaccagccagccggaagggccgagcgcagaagtggtcctgcaactttatccgcctccatccagtctattaattgttgccgggaagctagagtaagtagttcgccagttaatagtttgcgcaacgttgttgccattgctacaggcatcgtggtgtcacgctcgtcgtttggtatggcttcattcagctccggttcccaacgatcaaggcgagttacatgatcccccatgttgtgcaaaaaagcggttagctccttcggtcctccgatcgttgtcagaagtaagttggccgcagtgttatcactcatggttatggcagcactgcataattctcttactgtcatgccatccgtaagatgcttttctgtgactggtgagtactcaaccaagtcattctgagaatagtgtatgcggcgaccgagttgctcttgcccggcgtcaatacgggataataccgcgccacatagcagaactttaaaagtgctcatcattggaaaacgttcttcggggcgaaaactctcaaggatcttaccgctgttgagatccagttcgatgtaacccactcgtgcacccaactgatcttcagcatcttttactttcaccagcgtttctgggtgagcaaaaacaggaaggcaaaatgccgcaaaaaagggaataagggcgacacggaaatgttgaatactcatactcttcctttttcaatattattgaagcatttatcagggttattgtctcatgagcggatacatatttgaatgtatttagaaaaataaacaaataggggttccgcgcacatttccccgaaaagtgccacctgggtcgacattgattattgactagtaatagtaatcaattacggggtcattagttcatagcccatatatggagttccg

SEQ ID NO: 3979 - RNA, 5729 nt, Homo sapiens
  source 1..5729: mol_type = other RNA
cgttacataacttacggtaaatggcccgcctggctgaccgcccaacgacccccgcccattgacgtcaataatgacgtatgttcccatagtaacgccaatagggactttccattgacgtcaatgggtggagtatttacggtaaactgcccacttggcagtacatcaagtgtatcatatgccaagtacgccccctattgacgtcaatgacggtaaatggcccgcctggcattatgcccagtacatgaccttatgggactttcctacttggcagtacatctacgtattagtcatcgctattaccatggtgatgcggttttggcagtacatcaatgggcgtggatagcggtttgactcacggggatttccaagtctccaccccattgacgtcaatgggagtttgttttggcaccaaaatcaacgggactttccaaaatgtcgtaacaactccgccccattgacgcaaatgggcggtaggcgtgtacggtgggaggtctatataagcagagctggtttagtgaaccgtcagatccgctagcgctaccggactcagatcgccaccatgtacccctacgacgtgccagactacgcccctgcggcaaaaaagaaaaagttggacggcggctctggcggcggaggatctggcggaggtggaagcggaggaccgcctaagaagaagcagaagctggaacggctgaagaaactggacaagcccacactgcacacctgtaacaagaccagcttcgccaaggccttcctgcctaacgagacataccggcagcggctgctggactatatcgccatcattcaccagctggccgaccacgcctctcacgccctgaagttttacatcctgagcacctccaccagcagcttccctgtggtgcacgaggataccatcgaggccatcctgtacctgctgaacaagggcgaagcctggcatcccagaaaagaggccaagaaggcctggcgggattgcctgctgccttacgtgcagagatactgccagatcgtgggcttcattcaccccaacctgagaggcgagcagcagagcatcaactacctgaccgtgtccatgatgaccaacctgaaagtgaacgtgcaagagcacttcatgcagatgctgctgcggtacatcaatctgcgcttcgacgtgaagggccagaagcagagactgcctcctaagagcgacgcccgcaaggcctttttcacccggctgagatacctgaagtccgtgttcctgttcgacgtggtgcccgagctggaattcctggacgatctgacccctctggaaagcgaggtgctggaagagatctggtccctggacctgccttttctgcccaacgatcctctggcctacgccatcgtggccgatcctatgagcttcttcccagcctactgcaagctgagcggcctgtacgagcagtacggcttccagcggtttagcgccattcctctgcggagaagcctgatccagtctcacgtgcggatcgacaccatcatcctgtatcagcacatcctgtgcatcaccagacgggacgccgagacagtggaaaaggacgacctgtggatgagagtgtgcaacctgcggaccaaagccttccggtccagatgcggcatgcacttcgagggcagcatcacaacagatggcgccagcgtgtccgtgtacctgaaacaccctgaggccgataagtacggcaagagaggcgccagaaagtccgccaatactgtggccgccgaagtgaaggccctgtacgtggaaaacaacctgcctgcctgtagagccgccgagaacgtggtggtcatcgaccccaacaagcgggatatcctgtactgccaggacagcaacggcaccaccttcagatacaccgccaaccagagagccgtggaaaccggcagcagaagattcgccaagcggcgggaagccatgaaggaagaagccggcgttgacctgatcgagagcagaatccctagccacaagaccatgaacctgatggacttcaccagatacctgctcgtgcggagagccgactgggacagacggaaagagttctactctcaccccgctcacacccggtggaagtggcacagcttcatcaaccggcagaagtccgagagcaagctgatcagcaacatgcggaacaaatacggcgagaacttcaccgtggtcatgggcgattggagcgacgctggaagaaaggccagattccagaccagcagcaagaccaaaggctggcggaccctgttcaagcggaaccggatcgattgcttcctgctggacgagtacaagacctccagcgtgtgccctagatgcagcagcagcgagttcgtggaaaagaagttcaagacccggcctcacagcagaccctggcgaagaagagagggcaagatcgagaaggtgcacggcctgctgggctgcaccaatcctaattgtctgcagcaggcctggaccagcggcatgagatactggaaccgggacatgctgagcacatgcaacatgctgctgatcgtgcggtccatgctggatggccatggcagacctgaggtgttctctagatctgtgcctgccgtggcctgactagcataaccccttggggcgcactcctcaggtgcaggctgcctatcagaaggtggtggctggtgtggccaatgccctggctcacaaataccactgagatctttttccctctgccaaaaattatggggacatcatgaagccccttgagcatctgacttctggctaataaaggaaatttattttcattgcaatagtgtgttggaattttttgtgtctctcactcggaaggacatatgggagggcaaatcatttaaaacatcagaatgagtatttggtttagagtttggcaacatatgcccatatgctggctgccatgaacaaaggttggctataaagaggtcatcagtatatgaaacagccccctgctgtccattccttattccatagaaaagccttgacttgaggttagattttttttatattttgttttgtgttatttttttctttaacatccctaaaattttccttacatgttttactagccagatttttcctcctctcctgactactcccagtcatagctgtccctcttctcttatggagatccctcgacctgcagcccaagcttggcgtaatcatggtcatagctgtttcctgtgtgaaattgttatccgctcacaattccacacaacatacgagccggaagcataaagtgtaaagcctggggtgcctaatgagtgagctaactcacattaattgcgttgcgctcactgcccgctttccagtcgggaaacctgtcgtgccagcggatccgcatctcaattagtcagcaaccatagtcccgcccctaactccgcccatcccgcccctaactccgcccagttccgcccattctccgccccatggctgactaattttttttatttatgcagaggccgaggccgcctcggcctctgagctattccagaagtagtgaggaggcttttttggaggcctaggcttttgcaaaaagctaacttgtttattgcagcttataatggttacaaataaagcaatagcatcacaaatttcacaaataaagcatttttttcactgcattctagttgtggtttgtccaaactcatcaatgtatcttatcatgtctggatccgctgcattaatgaatcggccaacgcgcggggagaggcggtttgcgtattgggcgctcttccgcttcctcgctcactgactcgctgcgctcggtcgttcggctgcggcgagcggtatcagctcactcaaaggcggtaatacggttatccacagaatcaggggataacgcaggaaagaacatgtgagcaaaaggccagcaaaaggccaggaaccgtaaaaaggccgcgttgctggcgtttttccataggctccgcccccctgacgagcatcacaaaaatcgacgctcaagtcagaggtggcgaaacccgacaggactataaagataccaggcgtttccccctggaagctccctcgtgcgctctcctgttccgaccctgccgcttaccggatacctgtccgcctttctcccttcgggaagcgtggcgctttctcatagctcacgctgtaggtatctcagttcggtgtaggtcgttcgctccaagctgggctgtgtgcacgaaccccccgttcagcccgaccgctgcgccttatccggtaactatcgtcttgagtccaacccggtaagacacgacttatcgccactggcagcagccactggtaacaggattagcagagcgaggtatgtaggcggtgctacagagttcttgaagtggtggcctaactacggctacactagaagaacagtatttggtatctgcgctctgctgaagccagttaccttcggaaaaagagttggtagctcttgatccggcaaacaaaccaccgctggtagcggtggtttttttgtttgcaagcagcagattacgcgcagaaaaaaaggatctcaagaagatcctttgatcttttctacggggtctgacgctcagtggaacgaaaactcacgttaagggattttggtcatgagattatcaaaaaggatcttcacctagatccttttaaattaaaaatgaagttttaaatcaatctaaagtatatatgagtaaacttggtctgacagttaccaatgcttaatcagtgaggcacctatctcagcgatctgtctatttcgttcatccatagttgcctgactccccgtcgtgtagataactacgatacgggagggcttaccatctggccccagtgctgcaatgataccgcgagacccacgctcaccggctccagatttatcagcaataaaccagccagccggaagggccgagcgcagaagtggtcctgcaactttatccgcctccatccagtctattaattgttgccgggaagctagagtaagtagttcgccagttaatagtttgcgcaacgttgttgccattgctacaggcatcgtggtgtcacgctcgtcgtttggtatggcttcattcagctccggttcccaacgatcaaggcgagttacatgatcccccatgttgtgcaaaaaagcggttagctccttcggtcctccgatcgttgtcagaagtaagttggccgcagtgttatcactcatggttatggcagcactgcataattctcttactgtcatgccatccgtaagatgcttttctgtgactggtgagtactcaaccaagtcattctgagaatagtgtatgcggcgaccgagttgctcttgcccggcgtcaatacgggataataccgcgccacatagcagaactttaaaagtgctcatcattggaaaacgttcttcggggcgaaaactctcaaggatcttaccgctgttgagatccagttcgatgtaacccactcgtgcacccaactgatcttcagcatcttttactttcaccagcgtttctgggtgagcaaaaacaggaaggcaaaatgccgcaaaaaagggaataagggcgacacggaaatgttgaatactcatactcttcctttttcaatattattgaagcatttatcagggttattgtctcatgagcggatacatatttgaatgtatttagaaaaataaacaaataggggttccgcgcacatttccccgaaaagtgccacctgggtcgacattgattattgactagtaatagtaatcaattacggggtcattagttcatagcccatatatggagttccg

SEQ ID NO: 3980 - RNA, 5729 nt, Homo sapiens
  source 1..5729: mol_type = other RNA
cgttacataacttacggtaaatggcccgcctggctgaccgcccaacgacccccgcccattgacgtcaataatgacgtatgttcccatagtaacgccaatagggactttccattgacgtcaatgggtggagtatttacggtaaactgcccacttggcagtacatcaagtgtatcatatgccaagtacgccccctattgacgtcaatgacggtaaatggcccgcctggcattatgcccagtacatgaccttatgggactttcctacttggcagtacatctacgtattagtcatcgctattaccatggtgatgcggttttggcagtacatcaatgggcgtggatagcggtttgactcacggggatttccaagtctccaccccattgacgtcaatgggagtttgttttggcaccaaaatcaacgggactttccaaaatgtcgtaacaactccgccccattgacgcaaatgggcggtaggcgtgtacggtgggaggtctatataagcagagctggtttagtgaaccgtcagatccgctagcgctaccggactcagatcgccaccatgtacccctacgacgtgccagactacgcccctgcggcaaaaaagaaaaagttggacggcggctctggcggcggaggatctggcggaggtggaagcggaggaccgcctaagaagaagcagaagctggaacggctgaagaaactggacaagcccacactgcacacctgtaacaagaccagcttcgccaaggccttcctgcctaacgagacataccggcagcggctgctggactatatcgccatcattcaccagctggccgaccacgcctctcacgccctgaagttttacatcctgagcacctccaccagcagcttccctgtggtgcacgaggataccatcgaggccatcctgtacctgctgaacaagggcgaagcctggcatcccagaaaagaggccaagaaggcctggcgggattgcctgctgccttacgtgcagagatactgccagatcgtgggcttcattcaccccaacctgagaggcgagcagcagagcatcaactacctgaccgtgtccatgatgaccaacctgaaagtgaacgtgcaagagcacttcatgcagatgctgctgcggtacatcaatctgcgcttcgacgtgaagggccagaagcagagactgcctcctaagagcgacgcccgcaaggcctttttcacccggctgagatacctgaagtccgtgttcctgttcgacgtggtgcccgagctggaattcctggacgatctgacccctctggaaagcgaggtgctggaagagatctggtccctggacctgccttttctgcccaacgatcctctggcctacgccatcgtggccgatcctatgagcttcttcccagcctactgcaagctgagcggcctgtacgagcagtacggcttccagcggtttagcgccattcctctgcggagaagcctgatccagtctcacgtgcggatcgacaccatcatcctgtatcagcacatcctgtgcatcaccagacgggacgccgagacagtggaaaaggacgacctgtggatgagagtgtgcaacctgcggaccaaagccttccggtccagatgcggcatgcacttcgagggcagcatcacaacagatggcgccagcgtgtccgtgtacctgaaacaccctgaggccgataagtacggcaagagaggcgccagaaagtccgccaatactgtggccgccgaagtgaaggccctgtacgtggaaaacaacctgcctgcctgtagagccgccgagaacgtggtggtcatcgaccccaacaagcgggatatcctgtactgccaggacagcaacggcaccaccttcagatacaccgccaaccagagagccgtggaaaccggcagcagaagattcgccaagcggcgggaagccatgaaggaagaagccggcgttgacctgatcgagagcagaatccctagccacaagaccatgaacctgatggacttcaccagatacctgctcgtgcggagagccgactgggacagacggaaagagttctactctcaccccgctcacacccggtggaagtggcacagcttcatcaaccggcagaagtccgagagcgacctgatcagcaacatgcggaacaaatacggccgcaacttcaccgtggtcatgggcgattggagcgacgctggaagaaaggccagattccagaccagcagcaagaccaaaggctggcggaccctgttcaagcggaaccggatcgattgcttcctgctggacgagtacaagacctccagcgtgtgccctagatgcagcagcagcgagttcgtggaaaagaagttcaagacccggcctcacagcagaccctggcgaagaagagagggcaagatcgagaaggtgcacggcctgctgggctgcaccaatcctaattgtctgcagcaggcctggaccagcggcatgagatactggaaccgggacatgctgagcacatgcaacatgctgctgatcgtgcggtccatgctggatggccatggcagacctgaggtgttctctagatctgtgcctgccgtggcctgactagcataaccccttggggcgcactcctcaggtgcaggctgcctatcagaaggtggtggctggtgtggccaatgccctggctcacaaataccactgagatctttttccctctgccaaaaattatggggacatcatgaagccccttgagcatctgacttctggctaataaaggaaatttattttcattgcaatagtgtgttggaattttttgtgtctctcactcggaaggacatatgggagggcaaatcatttaaaacatcagaatgagtatttggtttagagtttggcaacatatgcccatatgctggctgccatgaacaaaggttggctataaagaggtcatcagtatatgaaacagccccctgctgtccattccttattccatagaaaagccttgacttgaggttagattttttttatattttgttttgtgttatttttttctttaacatccctaaaattttccttacatgttttactagccagatttttcctcctctcctgactactcccagtcatagctgtccctcttctcttatggagatccctcgacctgcagcccaagcttggcgtaatcatggtcatagctgtttcctgtgtgaaattgttatccgctcacaattccacacaacatacgagccggaagcataaagtgtaaagcctggggtgcctaatgagtgagctaactcacattaattgcgttgcgctcactgcccgctttccagtcgggaaacctgtcgtgccagcggatccgcatctcaattagtcagcaaccatagtcccgcccctaactccgcccatcccgcccctaactccgcccagttccgcccattctccgccccatggctgactaattttttttatttatgcagaggccgaggccgcctcggcctctgagctattccagaagtagtgaggaggcttttttggaggcctaggcttttgcaaaaagctaacttgtttattgcagcttataatggttacaaataaagcaatagcatcacaaatttcacaaataaagcatttttttcactgcattctagttgtggtttgtccaaactcatcaatgtatcttatcatgtctggatccgctgcattaatgaatcggccaacgcgcggggagaggcggtttgcgtattgggcgctcttccgcttcctcgctcactgactcgctgcgctcggtcgttcggctgcggcgagcggtatcagctcactcaaaggcggtaatacggttatccacagaatcaggggataacgcaggaaagaacatgtgagcaaaaggccagcaaaaggccaggaaccgtaaaaaggccgcgttgctggcgtttttccataggctccgcccccctgacgagcatcacaaaaatcgacgctcaagtcagaggtggcgaaacccgacaggactataaagataccaggcgtttccccctggaagctccctcgtgcgctctcctgttccgaccctgccgcttaccggatacctgtccgcctttctcccttcgggaagcgtggcgctttctcatagctcacgctgtaggtatctcagttcggtgtaggtcgttcgctccaagctgggctgtgtgcacgaaccccccgttcagcccgaccgctgcgccttatccggtaactatcgtcttgagtccaacccggtaagacacgacttatcgccactggcagcagccactggtaacaggattagcagagcgaggtatgtaggcggtgctacagagttcttgaagtggtggcctaactacggctacactagaagaacagtatttggtatctgcgctctgctgaagccagttaccttcggaaaaagagttggtagctcttgatccggcaaacaaaccaccgctggtagcggtggtttttttgtttgcaagcagcagattacgcgcagaaaaaaaggatctcaagaagatcctttgatcttttctacggggtctgacgctcagtggaacgaaaactcacgttaagggattttggtcatgagattatcaaaaaggatcttcacctagatccttttaaattaaaaatgaagttttaaatcaatctaaagtatatatgagtaaacttggtctgacagttaccaatgcttaatcagtgaggcacctatctcagcgatctgtctatttcgttcatccatagttgcctgactccccgtcgtgtagataactacgatacgggagggcttaccatctggccccagtgctgcaatgataccgcgagacccacgctcaccggctccagatttatcagcaataaaccagccagccggaagggccgagcgcagaagtggtcctgcaactttatccgcctccatccagtctattaattgttgccgggaagctagagtaagtagttcgccagttaatagtttgcgcaacgttgttgccattgctacaggcatcgtggtgtcacgctcgtcgtttggtatggcttcattcagctccggttcccaacgatcaaggcgagttacatgatcccccatgttgtgcaaaaaagcggttagctccttcggtcctccgatcgttgtcagaagtaagttggccgcagtgttatcactcatggttatggcagcactgcataattctcttactgtcatgccatccgtaagatgcttttctgtgactggtgagtactcaaccaagtcattctgagaatagtgtatgcggcgaccgagttgctcttgcccggcgtcaatacgggataataccgcgccacatagcagaactttaaaagtgctcatcattggaaaacgttcttcggggcgaaaactctcaaggatcttaccgctgttgagatccagttcgatgtaacccactcgtgcacccaactgatcttcagcatcttttactttcaccagcgtttctgggtgagcaaaaacaggaaggcaaaatgccgcaaaaaagggaataagggcgacacggaaatgttgaatactcatactcttcctttttcaatattattgaagcatttatcagggttattgtctcatgagcggatacatatttgaatgtatttagaaaaataaacaaataggggttccgcgcacatttccccgaaaagtgccacctgggtcgacattgattattgactagtaatagtaatcaattacggggtcattagttcatagcccatatatggagttccg

SEQ ID NO: 3981 - RNA, 5729 nt, Homo sapiens
  source 1..5729: mol_type = other RNA
cgttacataacttacggtaaatggcccgcctggctgaccgcccaacgacccccgcccattgacgtcaataatgacgtatgttcccatagtaacgccaatagggactttccattgacgtcaatgggtggagtatttacggtaaactgcccacttggcagtacatcaagtgtatcatatgccaagtacgccccctattgacgtcaatgacggtaaatggcccgcctggcattatgcccagtacatgaccttatgggactttcctacttggcagtacatctacgtattagtcatcgctattaccatggtgatgcggttttggcagtacatcaatgggcgtggatagcggtttgactcacggggatttccaagtctccaccccattgacgtcaatgggagtttgttttggcaccaaaatcaacgggactttccaaaatgtcgtaacaactccgccccattgacgcaaatgggcggtaggcgtgtacggtgggaggtctatataagcagagctggtttagtgaaccgtcagatccgctagcgctaccggactcagatcgccaccatgtacccctacgacgtgccagactacgcccctgcggcaaaaaagaaaaagttggacggcggctctggcggcggaggatctggcggaggtggaagcggaggaccgcctaagaagaagcagaagctggaacggctgaagaaactggacaagcccacactgcacacctgtaacaagaccagcttcgccaaggccttcctgcctaacgagacataccggcagcggctgctggactatatcgccatcattcaccagctggccgaccacgcctctcacgccctgaagttttacatcctgagcacctccaccagcagcttccctgtggtgcacgaggataccatcgaggccatcctgtacctgctgaacaagggcgaagcctggcatcccagaaaagaggccaagaaggcctggcgggattgcctgctgccttacgtgcagagatactgccagatcgtgggcttcattcaccccaacctgagaggcgagcagcagagcatcaactacctgaccgtgtccatgatgaccaacctgaaagtgaacgtgcaagagcacttcatgcagatgctgctgcggtacatcaatctgcgcttcgacgtgaagggccagaagcagagactgcctcctaagagcgacgcccgcaaggcctttttcacccggctgagatacctgaagtccgtgttcctgttcgacgtggtgcccgagctggaattcctggacgatctgacccctctggaaagcgaggtgctggaagagatctggtccctggacctgccttttctgcccaacgatcctctggcctacgccatcgtggccgatcctatgagcttcttcccagcctactgcaagctgagcggcctgtacgagcagtacggcttccagcggtttagcgccattcctctgcggagaagcctgatccagtctcacgtgcggatcgacaccatcatcctgtatcagcacatcctgtgcatcaccagacgggacgccgagacagtggaaaaggacgacctgtggatgagagtgtgcaacctgtgcaccaaagccttccggtccagatgcggcatgcacttcgagggcagcatcacaacagatggcgccagcgtgtccgtgtacctgaaacaccctgaggccgataagtacggcaagagaggcgccagaaagtccgccaatactgtggccgccgaagtgaaggccctgtacgtggaaaacaacctgcctgcctgtagagccgccgagaacgtggtggtcatcgaccccaacaagcgggatatcctgtactgccaggacagcaacggcaccaccttcagatacaccgccaaccagagagccgtggaaaccggcagcagaagattcgccaagcggcgggaagccatgaaggaagaagccggcgttgacctgatcgagagcagaatccctagccacaagaccatgaacctgatggacttcaccagatacctgctcgtgcggagagccgactgggacagacggaaagagttctactctcaccccgctcacacccggtggaagtggcacagcttcatcaaccggcagaagtccgagagcaagctgatcagcaacatgcggaacaaatacggccgcaacttcaccgtggtcatgggcgattggagcgacgctggaagaaaggccagattccagaccagcagcaagaccaaaggctggcggaccctgttcaagcggaaccggatcgattgcttcctgctggacgagtacaagacctccagcgtgtgccctagatgcagcagcagcgagttcgtggaaaagaagttcaagacccggcctcacagcagaccctggcgaagaagagagggcaagatcgagaaggtgcacggcctgctgggctgcaccaatcctaattgtctgcagcaggcctggaccagcggcatgagatactggaaccgggacatgctgagcacatgcaacatgctgctgatcgtgcggtccatgctggatggccatggcagacctgaggtgttctctagatctgtgcctgccgtggcctgactagcataaccccttggggcgcactcctcaggtgcaggctgcctatcagaaggtggtggctggtgtggccaatgccctggctcacaaataccactgagatctttttccctctgccaaaaattatggggacatcatgaagccccttgagcatctgacttctggctaataaaggaaatttattttcattgcaatagtgtgttggaattttttgtgtctctcactcggaaggacatatgggagggcaaatcatttaaaacatcagaatgagtatttggtttagagtttggcaacatatgcccatatgctggctgccatgaacaaaggttggctataaagaggtcatcagtatatgaaacagccccctgctgtccattccttattccatagaaaagccttgacttgaggttagattttttttatattttgttttgtgttatttttttctttaacatccctaaaattttccttacatgttttactagccagatttttcctcctctcctgactactcccagtcatagctgtccctcttctcttatggagatccctcgacctgcagcccaagcttggcgtaatcatggtcatagctgtttcctgtgtgaaattgttatccgctcacaattccacacaacatacgagccggaagcataaagtgtaaagcctggggtgcctaatgagtgagctaactcacattaattgcgttgcgctcactgcccgctttccagtcgggaaacctgtcgtgccagcggatccgcatctcaattagtcagcaaccatagtcccgcccctaactccgcccatcccgcccctaactccgcccagttccgcccattctccgccccatggctgactaattttttttatttatgcagaggccgaggccgcctcggcctctgagctattccagaagtagtgaggaggcttttttggaggcctaggcttttgcaaaaagctaacttgtttattgcagcttataatggttacaaataaagcaatagcatcacaaatttcacaaataaagcatttttttcactgcattctagttgtggtttgtccaaactcatcaatgtatcttatcatgtctggatccgctgcattaatgaatcggccaacgcgcggggagaggcggtttgcgtattgggcgctcttccgcttcctcgctcactgactcgctgcgctcggtcgttcggctgcggcgagcggtatcagctcactcaaaggcggtaatacggttatccacagaatcaggggataacgcaggaaagaacatgtgagcaaaaggccagcaaaaggccaggaaccgtaaaaaggccgcgttgctggcgtttttccataggctccgcccccctgacgagcatcacaaaaatcgacgctcaagtcagaggtggcgaaacccgacaggactataaagataccaggcgtttccccctggaagctccctcgtgcgctctcctgttccgaccctgccgcttaccggatacctgtccgcctttctcccttcgggaagcgtggcgctttctcatagctcacgctgtaggtatctcagttcggtgtaggtcgttcgctccaagctgggctgtgtgcacgaaccccccgttcagcccgaccgctgcgccttatccggtaactatcgtcttgagtccaacccggtaagacacgacttatcgccactggcagcagccactggtaacaggattagcagagcgaggtatgtaggcggtgctacagagttcttgaagtggtggcctaactacggctacactagaagaacagtatttggtatctgcgctctgctgaagccagttaccttcggaaaaagagttggtagctcttgatccggcaaacaaaccaccgctggtagcggtggtttttttgtttgcaagcagcagattacgcgcagaaaaaaaggatctcaagaagatcctttgatcttttctacggggtctgacgctcagtggaacgaaaactcacgttaagggattttggtcatgagattatcaaaaaggatcttcacctagatccttttaaattaaaaatgaagttttaaatcaatctaaagtatatatgagtaaacttggtctgacagttaccaatgcttaatcagtgaggcacctatctcagcgatctgtctatttcgttcatccatagttgcctgactccccgtcgtgtagataactacgatacgggagggcttaccatctggccccagtgctgcaatgataccgcgagacccacgctcaccggctccagatttatcagcaataaaccagccagccggaagggccgagcgcagaagtggtcctgcaactttatccgcctccatccagtctattaattgttgccgggaagctagagtaagtagttcgccagttaatagtttgcgcaacgttgttgccattgctacaggcatcgtggtgtcacgctcgtcgtttggtatggcttcattcagctccggttcccaacgatcaaggcgagttacatgatcccccatgttgtgcaaaaaagcggttagctccttcggtcctccgatcgttgtcagaagtaagttggccgcagtgttatcactcatggttatggcagcactgcataattctcttactgtcatgccatccgtaagatgcttttctgtgactggtgagtactcaaccaagtcattctgagaatagtgtatgcggcgaccgagttgctcttgcccggcgtcaatacgggataataccgcgccacatagcagaactttaaaagtgctcatcattggaaaacgttcttcggggcgaaaactctcaaggatcttaccgctgttgagatccagttcgatgtaacccactcgtgcacccaactgatcttcagcatcttttactttcaccagcgtttctgggtgagcaaaaacaggaaggcaaaatgccgcaaaaaagggaataagggcgacacggaaatgttgaatactcatactcttcctttttcaatattattgaagcatttatcagggttattgtctcatgagcggatacatatttgaatgtatttagaaaaataaacaaataggggttccgcgcacatttccccgaaaagtgccacctgggtcgacattgattattgactagtaatagtaatcaattacggggtcattagttcatagcccatatatggagttccg

SEQ ID NO: 3982 - RNA, 5729 nt, Homo sapiens
  source 1..5729: mol_type = other RNA
cgttacataacttacggtaaatggcccgcctggctgaccgcccaacgacccccgcccattgacgtcaataatgacgtatgttcccatagtaacgccaatagggactttccattgacgtcaatgggtggagtatttacggtaaactgcccacttggcagtacatcaagtgtatcatatgccaagtacgccccctattgacgtcaatgacggtaaatggcccgcctggcattatgcccagtacatgaccttatgggactttcctacttggcagtacatctacgtattagtcatcgctattaccatggtgatgcggttttggcagtacatcaatgggcgtggatagcggtttgactcacggggatttccaagtctccaccccattgacgtcaatgggagtttgttttggcaccaaaatcaacgggactttccaaaatgtcgtaacaactccgccccattgacgcaaatgggcggtaggcgtgtacggtgggaggtctatataagcagagctggtttagtgaaccgtcagatccgctagcgctaccggactcagatcgccaccatgtacccctacgacgtgccagactacgcccctgcggcaaaaaagaaaaagttggacggcggctctggcggcggaggatctggcggaggtggaagcggaggaccgcctaagaagaagcagaagctggaacggctgaagaaactggacaagcccacactgcacacctgtaacaagaccagcttcgccaaggccttcctgcctaacgagacataccggcagcggctgctggactatatcgccatcattcaccagctggccgaccacgcctctcacgccctgaagttttacatcctgagcacctccaccagcagcttccctgtggtgcacgaggataccatcgaggccatcctgtacctgctgaacaagggcgaagcctggcatcccagaaaagaggccaagaaggcctggcgggattgcctgctgccttacgtgcagagatactgccagatcgtgggcttcattcaccccaacctgagaggcgagcagcagagcatcaactacctgaccgtgtccatgatgaccaacctgaaagtgaacgtgcaagagcacttcatgcagatgctgctgcggtacatcaatctgcgcttcgacgtgaagggccagaagcagagactgcctcctaagagcgacgcccgcaaggcctttttcacccggctgagatacctgaagtccgtgttcctgttcgacgtggtgcccgagctggaattcctggacgatctgacccctctggaaagcgaggtgctggaagagatctggtccctggacctgccttttctgcccaacgatcctctggcctacgccatcgtggccgatcctatgagcttcttcccagcctactgcaagctgagcggcctgtacgagcagtacggcttccagcggtttagcgccattcctctgcggagaagcctgatccagtctcacgtgcggatcgacaccatcatcctgtatcagcacatcctgtgcatcaccagacgggacgccgagacagtggaaaagcgcgacctgtggatgagagtgtgcaacctgcggaccaaagccttccggtccagatgcggcatgcacttcgagggcagcatcacaacagatggcgccagcgtgtccgtgtacctgaaacaccctgaggccgataagtacggcaagagaggcgccagaaagtccgccaatactgtggccgccgaagtgaaggccctgtacgtggaaaacaacctgcctgcctgtagagccgccgagaacgtggtggtcatcgaccccaacaagcgggatatcctgtactgccaggacagcaacggcaccaccttcagatacaccgccaaccagagagccgtggaaaccggcagcagaagattcgccaagcggcgggaagccatgaaggaagaagccggcgttgacctgatcgagagcagaatccctagccacaagaccatgaacctgatggacttcaccagatacctgctcgtgcggagagccgactgggacagacggaaagagttctactctcaccccgctcacacccggtggaagtggcacagcttcatcaaccggcagaagtccgagagcaagctgatcagcaacatgcggaacaaatacggccgcaacttcaccgtggtcatgggcgattggagcgacgctggaagaaccgccagattccagaccagcagcaagaccaaaggctggcggaccctgttcaagcggaaccggatcgattgcttcctgctggacgagtacaagacctccagcgtgtgccctagatgcagcagcagcgagttcgtggaaaagaagttcaagacccggcctcacagcagaccctggcgaagaagagagggcaagatcgagaaggtgcacggcctgctgggctgcaccaatcctaattgtctgcagcaggcctggaccagcggcatgagatactggaaccgggacatgctgagcacatgcaacatgctgctgatcgtgcggtccatgctggatggccatggcagacctgaggtgttctctagatctgtgcctgccgtggcctgactagcataaccccttggggcgcactcctcaggtgcaggctgcctatcagaaggtggtggctggtgtggccaatgccctggctcacaaataccactgagatctttttccctctgccaaaaattatggggacatcatgaagccccttgagcatctgacttctggctaataaaggaaatttattttcattgcaatagtgtgttggaattttttgtgtctctcactcggaaggacatatgggagggcaaatcatttaaaacatcagaatgagtatttggtttagagtttggcaacatatgcccatatgctggctgccatgaacaaaggttggctataaagaggtcatcagtatatgaaacagccccctgctgtccattccttattccatagaaaagccttgacttgaggttagattttttttatattttgttttgtgttatttttttctttaacatccctaaaattttccttacatgttttactagccagatttttcctcctctcctgactactcccagtcatagctgtccctcttctcttatggagatccctcgacctgcagcccaagcttggcgtaatcatggtcatagctgtttcctgtgtgaaattgttatccgctcacaattccacacaacatacgagccggaagcataaagtgtaaagcctggggtgcctaatgagtgagctaactcacattaattgcgttgcgctcactgcccgctttccagtcgggaaacctgtcgtgccagcggatccgcatctcaattagtcagcaaccatagtcccgcccctaactccgcccatcccgcccctaactccgcccagttccgcccattctccgccccatggctgactaattttttttatttatgcagaggccgaggccgcctcggcctctgagctattccagaagtagtgaggaggcttttttggaggcctaggcttttgcaaaaagctaacttgtttattgcagcttataatggttacaaataaagcaatagcatcacaaatttcacaaataaagcatttttttcactgcattctagttgtggtttgtccaaactcatcaatgtatcttatcatgtctggatccgctgcattaatgaatcggccaacgcgcggggagaggcggtttgcgtattgggcgctcttccgcttcctcgctcactgactcgctgcgctcggtcgttcggctgcggcgagcggtatcagctcactcaaaggcggtaatacggttatccacagaatcaggggataacgcaggaaagaacatgtgagcaaaaggccagcaaaaggccaggaaccgtaaaaaggccgcgttgctggcgtttttccataggctccgcccccctgacgagcatcacaaaaatcgacgctcaagtcagaggtggcgaaacccgacaggactataaagataccaggcgtttccccctggaagctccctcgtgcgctctcctgttccgaccctgccgcttaccggatacctgtccgcctttctcccttcgggaagcgtggcgctttctcatagctcacgctgtaggtatctcagttcggtgtaggtcgttcgctccaagctgggctgtgtgcacgaaccccccgttcagcccgaccgctgcgccttatccggtaactatcgtcttgagtccaacccggtaagacacgacttatcgccactggcagcagccactggtaacaggattagcagagcgaggtatgtaggcggtgctacagagttcttgaagtggtggcctaactacggctacactagaagaacagtatttggtatctgcgctctgctgaagccagttaccttcggaaaaagagttggtagctcttgatccggcaaacaaaccaccgctggtagcggtggtttttttgtttgcaagcagcagattacgcgcagaaaaaaaggatctcaagaagatcctttgatcttttctacggggtctgacgctcagtggaacgaaaactcacgttaagggattttggtcatgagattatcaaaaaggatcttcacctagatccttttaaattaaaaatgaagttttaaatcaatctaaagtatatatgagtaaacttggtctgacagttaccaatgcttaatcagtgaggcacctatctcagcgatctgtctatttcgttcatccatagttgcctgactccccgtcgtgtagataactacgatacgggagggcttaccatctggccccagtgctgcaatgataccgcgagacccacgctcaccggctccagatttatcagcaataaaccagccagccggaagggccgagcgcagaagtggtcctgcaactttatccgcctccatccagtctattaattgttgccgggaagctagagtaagtagttcgccagttaatagtttgcgcaacgttgttgccattgctacaggcatcgtggtgtcacgctcgtcgtttggtatggcttcattcagctccggttcccaacgatcaaggcgagttacatgatcccccatgttgtgcaaaaaagcggttagctccttcggtcctccgatcgttgtcagaagtaagttggccgcagtgttatcactcatggttatggcagcactgcataattctcttactgtcatgccatccgtaagatgcttttctgtgactggtgagtactcaaccaagtcattctgagaatagtgtatgcggcgaccgagttgctcttgcccggcgtcaatacgggataataccgcgccacatagcagaactttaaaagtgctcatcattggaaaacgttcttcggggcgaaaactctcaaggatcttaccgctgttgagatccagttcgatgtaacccactcgtgcacccaactgatcttcagcatcttttactttcaccagcgtttctgggtgagcaaaaacaggaaggcaaaatgccgcaaaaaagggaataagggcgacacggaaatgttgaatactcatactcttcctttttcaatattattgaagcatttatcagggttattgtctcatgagcggatacatatttgaatgtatttagaaaaataaacaaataggggttccgcgcacatttccccgaaaagtgccacctgggtcgacattgattattgactagtaatagtaatcaattacggggtcattagttcatagcccatatatggagttccg

SEQ ID NO: 3983 - RNA, 5729 nt, Homo sapiens
  source 1..5729: mol_type = other RNA
cgttacataacttacggtaaatggcccgcctggctgaccgcccaacgacccccgcccattgacgtcaataatgacgtatgttcccatagtaacgccaatagggactttccattgacgtcaatgggtggagtatttacggtaaactgcccacttggcagtacatcaagtgtatcatatgccaagtacgccccctattgacgtcaatgacggtaaatggcccgcctggcattatgcccagtacatgaccttatgggactttcctacttggcagtacatctacgtattagtcatcgctattaccatggtgatgcggttttggcagtacatcaatgggcgtggatagcggtttgactcacggggatttccaagtctccaccccattgacgtcaatgggagtttgttttggcaccaaaatcaacgggactttccaaaatgtcgtaacaactccgccccattgacgcaaatgggcggtaggcgtgtacggtgggaggtctatataagcagagctggtttagtgaaccgtcagatccgctagcgctaccggactcagatcgccaccatgtacccctacgacgtgccagactacgcccctgcggcaaaaaagaaaaagttggacggcggctctggcggcggaggatctggcggaggtggaagcggaggaccgcctaagaagaagcagaagctggaacggctgaagaaactggacaagcccacactgcacacctgtaacaagaccagcttcgccaaggccttcctgcctaacgagacataccggcagcggctgctggactatatcgccatcattcaccagctggccgaccacgcctctcacgccctgaagttttacatcctgagcacctccaccagcagcttccctgtggtgcacgaggataccatcgaggccatcctgtacctgctgaacaagggcgaagcctggcatcccagaaaagaggccaagaaggcctggcgggattgcctgctgccttacgtgcagagatactgccagatcgtgggcttcattcaccccaacctgagaggcgagcagcagagcatcaactacctgaccgtgtccatgatgaccaacctgaaagtgaacgtgcaagagcacttcatgcagatgctgctgcggtacatcaatctgcgcttcgacgtgaagggccagaagcagagactgcctcctaagagcgacgcccgcaaggcctttttcacccggctgagatacctgaagtccgtgttcctgttcgacgtggtgcccgagctggaattcctggacgatctgacccctctggaaagcgaggtgctggaagagatctggtccctggacctgccttttctgcccaacgatcctctggcctacgccatcgtggccgatcctatgagcttcttcccagcctactgcaagctgagcggcctgtacgagcagtacggcttccagcggtttagcgccattcctctgcggagaagcctgatccagtctcacgtgcggatcgacaccatcatcctgtatcagcacatcctgtgcatcaccagacgggacgccgagacagtggaaaagcgcgacctgtggatgagagtgtgcaacctgcggaccaaagccttccggtccagatgcggcatgcacttcgagggcagcatcacaacagatggcgccagcgtgtccgtgtacctgaaacaccctgaggccgataagtacggcaagagaggcgccagaaagtccgccaatactgtggccgccgaagtgaaggccctgtacgtggaaaacaacctgcctgcctgtagagccgccgagaacgtggtggtcatcgaccccaacaagcgggatatcctgtactgccaggacagcaacggcaccaccttcagatacaccgccaaccagagagccgtggaaaccggcagcagaagattcgccaagcggcgggaagccatgaaggaagaagccggcgttgacctgatcgagagcagaatccctagccacaagaccatgaacctgatggacttcaccagatacctgctcgtgcggagagccgactgggacagacggaaagagttctactctcaccccgctcacacccggtggaagtggcacagcttcatcaaccggcagaagtccgagagcaagctgatcagcaacatgcggaacaaatacggcgagaacttcaccgtggtcatgggcgattggagcgacgctggaagaaaggccagattccagaccagcagcaagaccaaaggctggcggaccctgttcaagcggaaccggatcgattgcttcctgctggacgagtacaagacctccagcgtgtgccctagatgcagcagcagcgagttcgtggaaaagaagttcaagacccggcctcacagcagaccctggcgaagaagagagggcaagatcgagaaggtgcacggcctgctgggctgcaccaatcctaattgtctgcagcaggcctggaccagcggcatgagatactggaaccgggacatgctgagcacatgcaacatgctgctgatcgtgcggtccatgctggatggccatggcagacctgaggtgttctctagatctgtgcctgccgtggcctgactagcataaccccttggggcgcactcctcaggtgcaggctgcctatcagaaggtggtggctggtgtggccaatgccctggctcacaaataccactgagatctttttccctctgccaaaaattatggggacatcatgaagccccttgagcatctgacttctggctaataaaggaaatttattttcattgcaatagtgtgttggaattttttgtgtctctcactcggaaggacatatgggagggcaaatcatttaaaacatcagaatgagtatttggtttagagtttggcaacatatgcccatatgctggctgccatgaacaaaggttggctataaagaggtcatcagtatatgaaacagccccctgctgtccattccttattccatagaaaagccttgacttgaggttagattttttttatattttgttttgtgttatttttttctttaacatccctaaaattttccttacatgttttactagccagatttttcctcctctcctgactactcccagtcatagctgtccctcttctcttatggagatccctcgacctgcagcccaagcttggcgtaatcatggtcatagctgtttcctgtgtgaaattgttatccgctcacaattccacacaacatacgagccggaagcataaagtgtaaagcctggggtgcctaatgagtgagctaactcacattaattgcgttgcgctcactgcccgctttccagtcgggaaacctgtcgtgccagcggatccgcatctcaattagtcagcaaccatagtcccgcccctaactccgcccatcccgcccctaactccgcccagttccgcccattctccgccccatggctgactaattttttttatttatgcagaggccgaggccgcctcggcctctgagctattccagaagtagtgaggaggcttttttggaggcctaggcttttgcaaaaagctaacttgtttattgcagcttataatggttacaaataaagcaatagcatcacaaatttcacaaataaagcatttttttcactgcattctagttgtggtttgtccaaactcatcaatgtatcttatcatgtctggatccgctgcattaatgaatcggccaacgcgcggggagaggcggtttgcgtattgggcgctcttccgcttcctcgctcactgactcgctgcgctcggtcgttcggctgcggcgagcggtatcagctcactcaaaggcggtaatacggttatccacagaatcaggggataacgcaggaaagaacatgtgagcaaaaggccagcaaaaggccaggaaccgtaaaaaggccgcgttgctggcgtttttccataggctccgcccccctgacgagcatcacaaaaatcgacgctcaagtcagaggtggcgaaacccgacaggactataaagataccaggcgtttccccctggaagctccctcgtgcgctctcctgttccgaccctgccgcttaccggatacctgtccgcctttctcccttcgggaagcgtggcgctttctcatagctcacgctgtaggtatctcagttcggtgtaggtcgttcgctccaagctgggctgtgtgcacgaaccccccgttcagcccgaccgctgcgccttatccggtaactatcgtcttgagtccaacccggtaagacacgacttatcgccactggcagcagccactggtaacaggattagcagagcgaggtatgtaggcggtgctacagagttcttgaagtggtggcctaactacggctacactagaagaacagtatttggtatctgcgctctgctgaagccagttaccttcggaaaaagagttggtagctcttgatccggcaaacaaaccaccgctggtagcggtggtttttttgtttgcaagcagcagattacgcgcagaaaaaaaggatctcaagaagatcctttgatcttttctacggggtctgacgctcagtggaacgaaaactcacgttaagggattttggtcatgagattatcaaaaaggatcttcacctagatccttttaaattaaaaatgaagttttaaatcaatctaaagtatatatgagtaaacttggtctgacagttaccaatgcttaatcagtgaggcacctatctcagcgatctgtctatttcgttcatccatagttgcctgactccccgtcgtgtagataactacgatacgggagggcttaccatctggccccagtgctgcaatgataccgcgagacccacgctcaccggctccagatttatcagcaataaaccagccagccggaagggccgagcgcagaagtggtcctgcaactttatccgcctccatccagtctattaattgttgccgggaagctagagtaagtagttcgccagttaatagtttgcgcaacgttgttgccattgctacaggcatcgtggtgtcacgctcgtcgtttggtatggcttcattcagctccggttcccaacgatcaaggcgagttacatgatcccccatgttgtgcaaaaaagcggttagctccttcggtcctccgatcgttgtcagaagtaagttggccgcagtgttatcactcatggttatggcagcactgcataattctcttactgtcatgccatccgtaagatgcttttctgtgactggtgagtactcaaccaagtcattctgagaatagtgtatgcggcgaccgagttgctcttgcccggcgtcaatacgggataataccgcgccacatagcagaactttaaaagtgctcatcattggaaaacgttcttcggggcgaaaactctcaaggatcttaccgctgttgagatccagttcgatgtaacccactcgtgcacccaactgatcttcagcatcttttactttcaccagcgtttctgggtgagcaaaaacaggaaggcaaaatgccgcaaaaaagggaataagggcgacacggaaatgttgaatactcatactcttcctttttcaatattattgaagcatttatcagggttattgtctcatgagcggatacatatttgaatgtatttagaaaaataaacaaataggggttccgcgcacatttccccgaaaagtgccacctgggtcgacattgattattgactagtaatagtaatcaattacggggtcattagttcatagcccatatatggagttccg

SEQ ID NO: 3984 - RNA, 5729 nt, Homo sapiens
  source 1..5729: mol_type = other RNA
cgttacataacttacggtaaatggcccgcctggctgaccgcccaacgacccccgcccattgacgtcaataatgacgtatgttcccatagtaacgccaatagggactttccattgacgtcaatgggtggagtatttacggtaaactgcccacttggcagtacatcaagtgtatcatatgccaagtacgccccctattgacgtcaatgacggtaaatggcccgcctggcattatgcccagtacatgaccttatgggactttcctacttggcagtacatctacgtattagtcatcgctattaccatggtgatgcggttttggcagtacatcaatgggcgtggatagcggtttgactcacggggatttccaagtctccaccccattgacgtcaatgggagtttgttttggcaccaaaatcaacgggactttccaaaatgtcgtaacaactccgccccattgacgcaaatgggcggtaggcgtgtacggtgggaggtctatataagcagagctggtttagtgaaccgtcagatccgctagcgctaccggactcagatcgccaccatgtacccctacgacgtgccagactacgcccctgcggcaaaaaagaaaaagttggacggcggctctggcggcggaggatctggcggaggtggaagcggaggaccgcctaagaagaagcagaagctggaacggctgaagaaactggacaagcccacactgcacacctgtaacaagaccagcttcgccaaggccttcctgcctaacgagacataccggcagcggctgctggactatatcgccatcattcaccagctggccgaccacgcctctcacgccctgaagttttacatcctgagcacctccaccagcagcttccctgtggtgcacgaggataccatcgaggccatcctgtacctgctgaacaagggcgaagcctggcatcccagaaaagaggccaagaaggcctggcgggattgcctgctgccttacgtgcagagatactgccagatcgtgggcttcattcaccccaacctgagaggcgagcagcagagcatcaactacctgaccgtgtccatgatgaccaacctgaaagtgaacgtgcaagagcacttcatgcagatgctgctgcggtacatcaatctgcgcttcgacgtgaagggccagaagcagagactgcctcctaagagcgacgcccgcaaggcctttttcacccggctgagatacctgaagtccgtgttcctgttcgacgtggtgcccgagctggaattcctggacgatctgacccctctggaaagcgaggtgctggaagagatctggtccctggacctgccttttctgcccaacgatcctctggcctacgccatcgtggccgatcctatgagcttcttcccagcctactgcaagctgagcggcctgtacgagcagtacggcttccagcggtttagcgccattcctctgcggagaagcctgatccagtctcacgtgcggatcgacaccatcatcctgtatcagcacatcctgtgcatcaccagacgggacgccgagacagtggaaaagcgcgacctgtggatgagagtgtgcaacctgcggaccaaagccttccggtccagatgcggcatgcacttcgagggcagcatcacaacagatggcgccagcgtgtccgtgtacctgaaacaccctgaggccgataagtacggcaagagaggcgccagaaagtccgccaatactgtggccgccgaagtgaaggccctgtacgtggaaaacaacctgcctgcctgtagagccgccgagaacgtggtggtcatcgaccccaacaagcgggatatcctgtactgccaggacagcaacggcaccaccttcagatacaccgccaaccagagagccgtggaaaccggcagcagaagattcgccaagcggcgggaagccatgaaggaagaagccggcgttgacctgatcgagagcagaatccctagccacaagaccatgaacctgatggacttcaccagatacctgctcgtgcggagagccgactgggacagacggaaagagttctactctcaccccgctcacacccggtggaagtggcacagcttcatcaaccggcagaagtccgagagcgacctgatcagcaacatgcggaacaaatacggccgcaacttcaccgtggtcatgggcgattggagcgacgctggaagaaaggccagattccagaccagcagcaagaccaaaggctggcggaccctgttcaagcggaaccggatcgattgcttcctgctggacgagtacaagacctccagcgtgtgccctagatgcagcagcagcgagttcgtggaaaagaagttcaagacccggcctcacagcagaccctggcgaagaagagagggcaagatcgagaaggtgcacggcctgctgggctgcaccaatcctaattgtctgcagcaggcctggaccagcggcatgagatactggaaccgggacatgctgagcacatgcaacatgctgctgatcgtgcggtccatgctggatggccatggcagacctgaggtgttctctagatctgtgcctgccgtggcctgactagcataaccccttggggcgcactcctcaggtgcaggctgcctatcagaaggtggtggctggtgtggccaatgccctggctcacaaataccactgagatctttttccctctgccaaaaattatggggacatcatgaagccccttgagcatctgacttctggctaataaaggaaatttattttcattgcaatagtgtgttggaattttttgtgtctctcactcggaaggacatatgggagggcaaatcatttaaaacatcagaatgagtatttggtttagagtttggcaacatatgcccatatgctggctgccatgaacaaaggttggctataaagaggtcatcagtatatgaaacagccccctgctgtccattccttattccatagaaaagccttgacttgaggttagattttttttatattttgttttgtgttatttttttctttaacatccctaaaattttccttacatgttttactagccagatttttcctcctctcctgactactcccagtcatagctgtccctcttctcttatggagatccctcgacctgcagcccaagcttggcgtaatcatggtcatagctgtttcctgtgtgaaattgttatccgctcacaattccacacaacatacgagccggaagcataaagtgtaaagcctggggtgcctaatgagtgagctaactcacattaattgcgttgcgctcactgcccgctttccagtcgggaaacctgtcgtgccagcggatccgcatctcaattagtcagcaaccatagtcccgcccctaactccgcccatcccgcccctaactccgcccagttccgcccattctccgccccatggctgactaattttttttatttatgcagaggccgaggccgcctcggcctctgagctattccagaagtagtgaggaggcttttttggaggcctaggcttttgcaaaaagctaacttgtttattgcagcttataatggttacaaataaagcaatagcatcacaaatttcacaaataaagcatttttttcactgcattctagttgtggtttgtccaaactcatcaatgtatcttatcatgtctggatccgctgcattaatgaatcggccaacgcgcggggagaggcggtttgcgtattgggcgctcttccgcttcctcgctcactgactcgctgcgctcggtcgttcggctgcggcgagcggtatcagctcactcaaaggcggtaatacggttatccacagaatcaggggataacgcaggaaagaacatgtgagcaaaaggccagcaaaaggccaggaaccgtaaaaaggccgcgttgctggcgtttttccataggctccgcccccctgacgagcatcacaaaaatcgacgctcaagtcagaggtggcgaaacccgacaggactataaagataccaggcgtttccccctggaagctccctcgtgcgctctcctgttccgaccctgccgcttaccggatacctgtccgcctttctcccttcgggaagcgtggcgctttctcatagctcacgctgtaggtatctcagttcggtgtaggtcgttcgctccaagctgggctgtgtgcacgaaccccccgttcagcccgaccgctgcgccttatccggtaactatcgtcttgagtccaacccggtaagacacgacttatcgccactggcagcagccactggtaacaggattagcagagcgaggtatgtaggcggtgctacagagttcttgaagtggtggcctaactacggctacactagaagaacagtatttggtatctgcgctctgctgaagccagttaccttcggaaaaagagttggtagctcttgatccggcaaacaaaccaccgctggtagcggtggtttttttgtttgcaagcagcagattacgcgcagaaaaaaaggatctcaagaagatcctttgatcttttctacggggtctgacgctcagtggaacgaaaactcacgttaagggattttggtcatgagattatcaaaaaggatcttcacctagatccttttaaattaaaaatgaagttttaaatcaatctaaagtatatatgagtaaacttggtctgacagttaccaatgcttaatcagtgaggcacctatctcagcgatctgtctatttcgttcatccatagttgcctgactccccgtcgtgtagataactacgatacgggagggcttaccatctggccccagtgctgcaatgataccgcgagacccacgctcaccggctccagatttatcagcaataaaccagccagccggaagggccgagcgcagaagtggtcctgcaactttatccgcctccatccagtctattaattgttgccgggaagctagagtaagtagttcgccagttaatagtttgcgcaacgttgttgccattgctacaggcatcgtggtgtcacgctcgtcgtttggtatggcttcattcagctccggttcccaacgatcaaggcgagttacatgatcccccatgttgtgcaaaaaagcggttagctccttcggtcctccgatcgttgtcagaagtaagttggccgcagtgttatcactcatggttatggcagcactgcataattctcttactgtcatgccatccgtaagatgcttttctgtgactggtgagtactcaaccaagtcattctgagaatagtgtatgcggcgaccgagttgctcttgcccggcgtcaatacgggataataccgcgccacatagcagaactttaaaagtgctcatcattggaaaacgttcttcggggcgaaaactctcaaggatcttaccgctgttgagatccagttcgatgtaacccactcgtgcacccaactgatcttcagcatcttttactttcaccagcgtttctgggtgagcaaaaacaggaaggcaaaatgccgcaaaaaagggaataagggcgacacggaaatgttgaatactcatactcttcctttttcaatattattgaagcatttatcagggttattgtctcatgagcggatacatatttgaatgtatttagaaaaataaacaaataggggttccgcgcacatttccccgaaaagtgccacctgggtcgacattgattattgactagtaatagtaatcaattacggggtcattagttcatagcccatatatggagttccg

SEQ ID NO: 3985 - RNA, 5729 nt, Homo sapiens
  source 1..5729: mol_type = other RNA
cgttacataacttacggtaaatggcccgcctggctgaccgcccaacgacccccgcccattgacgtcaataatgacgtatgttcccatagtaacgccaatagggactttccattgacgtcaatgggtggagtatttacggtaaactgcccacttggcagtacatcaagtgtatcatatgccaagtacgccccctattgacgtcaatgacggtaaatggcccgcctggcattatgcccagtacatgaccttatgggactttcctacttggcagtacatctacgtattagtcatcgctattaccatggtgatgcggttttggcagtacatcaatgggcgtggatagcggtttgactcacggggatttccaagtctccaccccattgacgtcaatgggagtttgttttggcaccaaaatcaacgggactttccaaaatgtcgtaacaactccgccccattgacgcaaatgggcggtaggcgtgtacggtgggaggtctatataagcagagctggtttagtgaaccgtcagatccgctagcgctaccggactcagatcgccaccatgtacccctacgacgtgccagactacgcccctgcggcaaaaaagaaaaagttggacggcggctctggcggcggaggatctggcggaggtggaagcggaggaccgcctaagaagaagcagaagctggaacggctgaagaaactggacaagcccacactgcacacctgtaacaagaccagcttcgccaaggccttcctgcctaacgagacataccggcagcggctgctggactatatcgccatcattcaccagctggccgaccacgcctctcacgccctgaagttttacatcctgagcacctccaccagcagcttccctgtggtgcacgaggataccatcgaggccatcctgtacctgctgaacaagggcgaagcctggcatcccagaaaagaggccaagaaggcctggcgggattgcctgctgccttacgtgcagagatactgccagatcgtgggcttcattcaccccaacctgagaggcgagcagcagagcatcaactacctgaccgtgtccatgatgaccaacctgaaagtgaacgtgcaagagcacttcatgcagatgctgctgcggtacatcaatctgcgcttcgacgtgaagggccagaagcagagactgcctcctaagagcgacgcccgcaaggcctttttcacccggctgagatacctgaagtccgtgttcctgttcgacgtggtgcccgagctggaattcctggacgatctgacccctctggaaagcgaggtgctggaagagatctggtccctggacctgccttttctgcccaacgatcctctggcctacgccatcgtggccgatcctatgagcttcttcccagcctactgcaagctgagcggcctgtacgagcagtacggcttccagcggtttagcgccattcctctgcggagaagcctgatccagtctcacgtgcggatcgacaccatcatcctgtatcagcacatcctgtgcatcaccagacgggacgccgagacagtggaaaagcgcgacctgtggatgagagtgtgcaacctgtgcaccaaagccttccggtccagatgcggcatgcacttcgagggcagcatcacaacagatggcgccagcgtgtccgtgtacctgaaacaccctgaggccgataagtacggcaagagaggcgccagaaagtccgccaatactgtggccgccgaagtgaaggccctgtacgtggaaaacaacctgcctgcctgtagagccgccgagaacgtggtggtcatcgaccccaacaagcgggatatcctgtactgccaggacagcaacggcaccaccttcagatacaccgccaaccagagagccgtggaaaccggcagcagaagattcgccaagcggcgggaagccatgaaggaagaagccggcgttgacctgatcgagagcagaatccctagccacaagaccatgaacctgatggacttcaccagatacctgctcgtgcggagagccgactgggacagacggaaagagttctactctcaccccgctcacacccggtggaagtggcacagcttcatcaaccggcagaagtccgagagcaagctgatcagcaacatgcggaacaaatacggccgcaacttcaccgtggtcatgggcgattggagcgacgctggaagaaaggccagattccagaccagcagcaagaccaaaggctggcggaccctgttcaagcggaaccggatcgattgcttcctgctggacgagtacaagacctccagcgtgtgccctagatgcagcagcagcgagttcgtggaaaagaagttcaagacccggcctcacagcagaccctggcgaagaagagagggcaagatcgagaaggtgcacggcctgctgggctgcaccaatcctaattgtctgcagcaggcctggaccagcggcatgagatactggaaccgggacatgctgagcacatgcaacatgctgctgatcgtgcggtccatgctggatggccatggcagacctgaggtgttctctagatctgtgcctgccgtggcctgactagcataaccccttggggcgcactcctcaggtgcaggctgcctatcagaaggtggtggctggtgtggccaatgccctggctcacaaataccactgagatctttttccctctgccaaaaattatggggacatcatgaagccccttgagcatctgacttctggctaataaaggaaatttattttcattgcaatagtgtgttggaattttttgtgtctctcactcggaaggacatatgggagggcaaatcatttaaaacatcagaatgagtatttggtttagagtttggcaacatatgcccatatgctggctgccatgaacaaaggttggctataaagaggtcatcagtatatgaaacagccccctgctgtccattccttattccatagaaaagccttgacttgaggttagattttttttatattttgttttgtgttatttttttctttaacatccctaaaattttccttacatgttttactagccagatttttcctcctctcctgactactcccagtcatagctgtccctcttctcttatggagatccctcgacctgcagcccaagcttggcgtaatcatggtcatagctgtttcctgtgtgaaattgttatccgctcacaattccacacaacatacgagccggaagcataaagtgtaaagcctggggtgcctaatgagtgagctaactcacattaattgcgttgcgctcactgcccgctttccagtcgggaaacctgtcgtgccagcggatccgcatctcaattagtcagcaaccatagtcccgcccctaactccgcccatcccgcccctaactccgcccagttccgcccattctccgccccatggctgactaattttttttatttatgcagaggccgaggccgcctcggcctctgagctattccagaagtagtgaggaggcttttttggaggcctaggcttttgcaaaaagctaacttgtttattgcagcttataatggttacaaataaagcaatagcatcacaaatttcacaaataaagcatttttttcactgcattctagttgtggtttgtccaaactcatcaatgtatcttatcatgtctggatccgctgcattaatgaatcggccaacgcgcggggagaggcggtttgcgtattgggcgctcttccgcttcctcgctcactgactcgctgcgctcggtcgttcggctgcggcgagcggtatcagctcactcaaaggcggtaatacggttatccacagaatcaggggataacgcaggaaagaacatgtgagcaaaaggccagcaaaaggccaggaaccgtaaaaaggccgcgttgctggcgtttttccataggctccgcccccctgacgagcatcacaaaaatcgacgctcaagtcagaggtggcgaaacccgacaggactataaagataccaggcgtttccccctggaagctccctcgtgcgctctcctgttccgaccctgccgcttaccggatacctgtccgcctttctcccttcgggaagcgtggcgctttctcatagctcacgctgtaggtatctcagttcggtgtaggtcgttcgctccaagctgggctgtgtgcacgaaccccccgttcagcccgaccgctgcgccttatccggtaactatcgtcttgagtccaacccggtaagacacgacttatcgccactggcagcagccactggtaacaggattagcagagcgaggtatgtaggcggtgctacagagttcttgaagtggtggcctaactacggctacactagaagaacagtatttggtatctgcgctctgctgaagccagttaccttcggaaaaagagttggtagctcttgatccggcaaacaaaccaccgctggtagcggtggtttttttgtttgcaagcagcagattacgcgcagaaaaaaaggatctcaagaagatcctttgatcttttctacggggtctgacgctcagtggaacgaaaactcacgttaagggattttggtcatgagattatcaaaaaggatcttcacctagatccttttaaattaaaaatgaagttttaaatcaatctaaagtatatatgagtaaacttggtctgacagttaccaatgcttaatcagtgaggcacctatctcagcgatctgtctatttcgttcatccatagttgcctgactccccgtcgtgtagataactacgatacgggagggcttaccatctggccccagtgctgcaatgataccgcgagacccacgctcaccggctccagatttatcagcaataaaccagccagccggaagggccgagcgcagaagtggtcctgcaactttatccgcctccatccagtctattaattgttgccgggaagctagagtaagtagttcgccagttaatagtttgcgcaacgttgttgccattgctacaggcatcgtggtgtcacgctcgtcgtttggtatggcttcattcagctccggttcccaacgatcaaggcgagttacatgatcccccatgttgtgcaaaaaagcggttagctccttcggtcctccgatcgttgtcagaagtaagttggccgcagtgttatcactcatggttatggcagcactgcataattctcttactgtcatgccatccgtaagatgcttttctgtgactggtgagtactcaaccaagtcattctgagaatagtgtatgcggcgaccgagttgctcttgcccggcgtcaatacgggataataccgcgccacatagcagaactttaaaagtgctcatcattggaaaacgttcttcggggcgaaaactctcaaggatcttaccgctgttgagatccagttcgatgtaacccactcgtgcacccaactgatcttcagcatcttttactttcaccagcgtttctgggtgagcaaaaacaggaaggcaaaatgccgcaaaaaagggaataagggcgacacggaaatgttgaatactcatactcttcctttttcaatattattgaagcatttatcagggttattgtctcatgagcggatacatatttgaatgtatttagaaaaataaacaaataggggttccgcgcacatttccccgaaaagtgccacctgggtcgacattgattattgactagtaatagtaatcaattacggggtcattagttcatagcccatatatggagttccg

SEQ ID NO: 3986 - RNA, 5729 nt, Homo sapiens
  source 1..5729: mol_type = other RNA
cgttacataacttacggtaaatggcccgcctggctgaccgcccaacgacccccgcccattgacgtcaataatgacgtatgttcccatagtaacgccaatagggactttccattgacgtcaatgggtggagtatttacggtaaactgcccacttggcagtacatcaagtgtatcatatgccaagtacgccccctattgacgtcaatgacggtaaatggcccgcctggcattatgcccagtacatgaccttatgggactttcctacttggcagtacatctacgtattagtcatcgctattaccatggtgatgcggttttggcagtacatcaatgggcgtggatagcggtttgactcacggggatttccaagtctccaccccattgacgtcaatgggagtttgttttggcaccaaaatcaacgggactttccaaaatgtcgtaacaactccgccccattgacgcaaatgggcggtaggcgtgtacggtgggaggtctatataagcagagctggtttagtgaaccgtcagatccgctagcgctaccggactcagatcgccaccatgtacccctacgacgtgccagactacgcccctgcggcaaaaaagaaaaagttggacggcggctctggcggcggaggatctggcggaggtggaagcggaggaccgcctaagaagaagcagaagctggaacggctgaagaaactggacaagcccacactgcacacctgtaacaagaccagcttcgccaaggccttcctgcctaacgagacataccggcagcggctgctggactatatcgccatcattcaccagctggccgaccacgcctctcacgccctgaagttttacatcctgagcacctccaccagcagcttccctgtggtgcacgaggataccatcgaggccatcctgtacctgctgaacaagggcgaagcctggcatcccagaaaagaggccaagaaggcctggcgggattgcctgctgccttacgtgcagagatactgccagatcgtgggcttcattcaccccaacctgagaggcgagcagcagagcatcaactacctgaccgtgtccatgatgaccaacctgaaagtgaacgtgcaagagcacttcatgcagatgctgctgcggtacatcaatctgcgcttcgacgtgaagggccagaagcagagactgcctcctaagagcgacgcccgcaaggcctttttcacccggctgagatacctgaagtccgtgttcctgttcgacgtggtgcccgagctggaattcctggacgatctgacccctctggaaagcgaggtgctggaagagatctggtccctggacctgccttttctgcccaacgatcctctggcctacgccatcgtggccgatcctatgagcttcttcccagcctactgcaagctgagcggcctgtacgagcagtacggcttccagcggtttagcgccattcctctgcggagaagcctgatccagtctcacgtgcggatcgacaccatcatcctgtatcagcacatcctgtgcatcaccagacgggacgccgagacagtggaaaaggacgacctgtggatgagagtgtgcaacctgcggaccaaagccttccggtccagatgcggcatgcacttcgagggcagcatcacaacagatggcgccagcgtgtccgtgtacctgaaacaccctgaggccgataagtacggcaagagaggcgccagaaagtccgccaatactgtggccgccgaagtgaaggccctgtacgtggaaaacaacctgcctgcctgtagagccgccgagaacgtggtggtcatcgaccccaacaagcgggatatcctgtactgccaggacagcaacggcaccaccttcagatacaccgccaaccagagagccgtggaaaccggcagcagaagattcgccaagcggcgggaagccatgaaggaagaagccggcgttgacctgatcgagagcagaatccctagccacaagaccatgaacctgatggacttcaccagatacctgctcgtgcggagagccgactgggacagacggaaagagttctactctcaccccgctcacacccggtggaagtggcacagcttcatcaaccggcagaagtccgagagcaagctgatcagcaacatgcggaacaaatacggccgcaacttcaccgtggtcatgggcgattggagcgacgctggaagaaaggccagattccagaccagcagcaagaccaaaggctggcggaccctgttcaagcggaaccggatcgattgcttcctgctggacgagtacaagacctccagcgtgtgccctagatgcagcagcagcgagttcgtggaaaagaagttcaagacccggcctcacagcagaccctggcgaagaagagagggcaagatcgagaaggtgcacggcctgctgggctgcaccaatcctaattgtctgcagcaggcctggaccagcggcatgagatactggaaccgggacatgctgagcacatgcaacatgctgctgatcgtgcggtccatgctggatggccatggcagacctgaggtgttctctagatctgtgcctgccgtggcctgactagcataaccccttggggcgcactcctcaggtgcaggctgcctatcagaaggtggtggctggtgtggccaatgccctggctcacaaataccactgagatctttttccctctgccaaaaattatggggacatcatgaagccccttgagcatctgacttctggctaataaaggaaatttattttcattgcaatagtgtgttggaattttttgtgtctctcactcggaaggacatatgggagggcaaatcatttaaaacatcagaatgagtatttggtttagagtttggcaacatatgcccatatgctggctgccatgaacaaaggttggctataaagaggtcatcagtatatgaaacagccccctgctgtccattccttattccatagaaaagccttgacttgaggttagattttttttatattttgttttgtgttatttttttctttaacatccctaaaattttccttacatgttttactagccagatttttcctcctctcctgactactcccagtcatagctgtccctcttctcttatggagatccctcgacctgcagcccaagcttggcgtaatcatggtcatagctgtttcctgtgtgaaattgttatccgctcacaattccacacaacatacgagccggaagcataaagtgtaaagcctggggtgcctaatgagtgagctaactcacattaattgcgttgcgctcactgcccgctttccagtcgggaaacctgtcgtgccagcggatccgcatctcaattagtcagcaaccatagtcccgcccctaactccgcccatcccgcccctaactccgcccagttccgcccattctccgccccatggctgactaattttttttatttatgcagaggccgaggccgcctcggcctctgagctattccagaagtagtgaggaggcttttttggaggcctaggcttttgcaaaaagctaacttgtttattgcagcttataatggttacaaataaagcaatagcatcacaaatttcacaaataaagcatttttttcactgcattctagttgtggtttgtccaaactcatcaatgtatcttatcatgtctggatccgctgcattaatgaatcggccaacgcgcggggagaggcggtttgcgtattgggcgctcttccgcttcctcgctcactgactcgctgcgctcggtcgttcggctgcggcgagcggtatcagctcactcaaaggcggtaatacggttatccacagaatcaggggataacgcaggaaagaacatgtgagcaaaaggccagcaaaaggccaggaaccgtaaaaaggccgcgttgctggcgtttttccataggctccgcccccctgacgagcatcacaaaaatcgacgctcaagtcagaggtggcgaaacccgacaggactataaagataccaggcgtttccccctggaagctccctcgtgcgctctcctgttccgaccctgccgcttaccggatacctgtccgcctttctcccttcgggaagcgtggcgctttctcatagctcacgctgtaggtatctcagttcggtgtaggtcgttcgctccaagctgggctgtgtgcacgaaccccccgttcagcccgaccgctgcgccttatccggtaactatcgtcttgagtccaacccggtaagacacgacttatcgccactggcagcagccactggtaacaggattagcagagcgaggtatgtaggcggtgctacagagttcttgaagtggtggcctaactacggctacactagaagaacagtatttggtatctgcgctctgctgaagccagttaccttcggaaaaagagttggtagctcttgatccggcaaacaaaccaccgctggtagcggtggtttttttgtttgcaagcagcagattacgcgcagaaaaaaaggatctcaagaagatcctttgatcttttctacggggtctgacgctcagtggaacgaaaactcacgttaagggattttggtcatgagattatcaaaaaggatcttcacctagatccttttaaattaaaaatgaagttttaaatcaatctaaagtatatatgagtaaacttggtctgacagttaccaatgcttaatcagtgaggcacctatctcagcgatctgtctatttcgttcatccatagttgcctgactccccgtcgtgtagataactacgatacgggagggcttaccatctggccccagtgctgcaatgataccgcgagacccacgctcaccggctccagatttatcagcaataaaccagccagccggaagggccgagcgcagaagtggtcctgcaactttatccgcctccatccagtctattaattgttgccgggaagctagagtaagtagttcgccagttaatagtttgcgcaacgttgttgccattgctacaggcatcgtggtgtcacgctcgtcgtttggtatggcttcattcagctccggttcccaacgatcaaggcgagttacatgatcccccatgttgtgcaaaaaagcggttagctccttcggtcctccgatcgttgtcagaagtaagttggccgcagtgttatcactcatggttatggcagcactgcataattctcttactgtcatgccatccgtaagatgcttttctgtgactggtgagtactcaaccaagtcattctgagaatagtgtatgcggcgaccgagttgctcttgcccggcgtcaatacgggataataccgcgccacatagcagaactttaaaagtgctcatcattggaaaacgttcttcggggcgaaaactctcaaggatcttaccgctgttgagatccagttcgatgtaacccactcgtgcacccaactgatcttcagcatcttttactttcaccagcgtttctgggtgagcaaaaacaggaaggcaaaatgccgcaaaaaagggaataagggcgacacggaaatgttgaatactcatactcttcctttttcaatattattgaagcatttatcagggttattgtctcatgagcggatacatatttgaatgtatttagaaaaataaacaaataggggttccgcgcacatttccccgaaaagtgccacctgggtcgacattgattattgactagtaatagtaatcaattacggggtcattagttcatagcccatatatggagttccg

SEQ ID NO: 3987 - RNA, 5729 nt, Homo sapiens
  source 1..5729: mol_type = other RNA
cgttacataacttacggtaaatggcccgcctggctgaccgcccaacgacccccgcccattgacgtcaataatgacgtatgttcccatagtaacgccaatagggactttccattgacgtcaatgggtggagtatttacggtaaactgcccacttggcagtacatcaagtgtatcatatgccaagtacgccccctattgacgtcaatgacggtaaatggcccgcctggcattatgcccagtacatgaccttatgggactttcctacttggcagtacatctacgtattagtcatcgctattaccatggtgatgcggttttggcagtacatcaatgggcgtggatagcggtttgactcacggggatttccaagtctccaccccattgacgtcaatgggagtttgttttggcaccaaaatcaacgggactttccaaaatgtcgtaacaactccgccccattgacgcaaatgggcggtaggcgtgtacggtgggaggtctatataagcagagctggtttagtgaaccgtcagatccgctagcgctaccggactcagatcgccaccatgtacccctacgacgtgccagactacgcccctgcggcaaaaaagaaaaagttggacggcggctctggcggcggaggatctggcggaggtggaagcggaggaccgcctaagaagaagcagaagctggaacggctgaagaaactggacaagcccacactgcacacctgtaacaagaccagcttcgccaaggccttcctgcctaacgagacataccggcagcggctgctggactatatcgccatcattcaccagctggccgaccacgcctctcacgccctgaagttttacatcctgagcacctccaccagcagcttccctgtggtgcacgaggataccatcgaggccatcctgtacctgctgaacaagggcgaagcctggcatcccagaaaagaggccaagaaggcctggcgggattgcctgctgccttacgtgcagagatactgccagatcgtgggcttcattcaccccaacctgagaggcgagcagcagagcatcaactacctgaccgtgtccatgatgaccaacctgaaagtgaacgtgcaagagcacttcatgcagatgctgctgcggtacatcaatctgcgcttcgacgtgaagggccagaagcagagactgcctcctaagagcgacgcccgcaaggcctttttcacccggctgagatacctgaagtccgtgttcctgttcgacgtggtgcccgagctggaattcctggacgatctgacccctctggaaagcgaggtgctggaagagatctggtccctggacctgccttttctgcccaacgatcctctggcctacgccatcgtggccgatcctatgagcttcttcccagcctactgcaagctgagcggcctgtacgagcagtacggcttccagcggtttagcgccattcctctgcggagaagcctgatccagtctcacgtgcggatcgacaccatcatcctgtatcagcacatcctgtgcatcaccagacgggacgccgagacagtggaaaagcgcgacctgtggatgagagtgtgcaacctgcggaccaaagccttccggtccagatgcggcatgcacttcgagggcagcatcacaacagatggcgccagcgtgtccgtgtacctgaaacaccctgaggccgataagtacggcaagagaggcgccagaaagtccgccaatactgtggccgccgaagtgaaggccctgtacgtggaaaacaacctgcctgcctgtagagccgccgagaacgtggtggtcatcgaccccaacaagcgggatatcctgtactgccaggacagcaacggcaccaccttcagatacaccgccaaccagagagccgtggaaaccggcagcagaagattcgccaagcggcgggaagccatgaaggaagaagccggcgttgacctgatcgagagcagaatccctagccacaagaccatgaacctgatggacttcaccagatacctgctcgtgcggagagccgactgggacagacggaaagagttctactctcaccccgctcacacccggtggaagtggcacagcttcatcaaccggcagaagtccgagagcaagctgatcagcaacatgcggaacaaatacggccgcaacttcaccgtggtcatgggcgattggagcgacgctggaagaaaggccagattccagaccagcagcaagaccaaaggctggcggaccctgttcaagcggaaccggatcgattgcttcctgctggacgagtacaagacctccagcgtgtgccctagatgcagcagcagcgagttcgtggaaaagaagttcaagacccggcctcacagcagaccctggcgaagaagagagggcaagatcgagaaggtgcacggcctgctgggctgcaccaatcctaattgtctgcagcaggcctggaccagcggcatgagatactggaaccgggacatgctgagcacatgcaacatgctgctgatcgtgcggtccatgctggatggccatggcagacctgaggtgttctctagatctgtgcctgccgtggcctgactagcataaccccttggggcgcactcctcaggtgcaggctgcctatcagaaggtggtggctggtgtggccaatgccctggctcacaaataccactgagatctttttccctctgccaaaaattatggggacatcatgaagccccttgagcatctgacttctggctaataaaggaaatttattttcattgcaatagtgtgttggaattttttgtgtctctcactcggaaggacatatgggagggcaaatcatttaaaacatcagaatgagtatttggtttagagtttggcaacatatgcccatatgctggctgccatgaacaaaggttggctataaagaggtcatcagtatatgaaacagccccctgctgtccattccttattccatagaaaagccttgacttgaggttagattttttttatattttgttttgtgttatttttttctttaacatccctaaaattttccttacatgttttactagccagatttttcctcctctcctgactactcccagtcatagctgtccctcttctcttatggagatccctcgacctgcagcccaagcttggcgtaatcatggtcatagctgtttcctgtgtgaaattgttatccgctcacaattccacacaacatacgagccggaagcataaagtgtaaagcctggggtgcctaatgagtgagctaactcacattaattgcgttgcgctcactgcccgctttccagtcgggaaacctgtcgtgccagcggatccgcatctcaattagtcagcaaccatagtcccgcccctaactccgcccatcccgcccctaactccgcccagttccgcccattctccgccccatggctgactaattttttttatttatgcagaggccgaggccgcctcggcctctgagctattccagaagtagtgaggaggcttttttggaggcctaggcttttgcaaaaagctaacttgtttattgcagcttataatggttacaaataaagcaatagcatcacaaatttcacaaataaagcatttttttcactgcattctagttgtggtttgtccaaactcatcaatgtatcttatcatgtctggatccgctgcattaatgaatcggccaacgcgcggggagaggcggtttgcgtattgggcgctcttccgcttcctcgctcactgactcgctgcgctcggtcgttcggctgcggcgagcggtatcagctcactcaaaggcggtaatacggttatccacagaatcaggggataacgcaggaaagaacatgtgagcaaaaggccagcaaaaggccaggaaccgtaaaaaggccgcgttgctggcgtttttccataggctccgcccccctgacgagcatcacaaaaatcgacgctcaagtcagaggtggcgaaacccgacaggactataaagataccaggcgtttccccctggaagctccctcgtgcgctctcctgttccgaccctgccgcttaccggatacctgtccgcctttctcccttcgggaagcgtggcgctttctcatagctcacgctgtaggtatctcagttcggtgtaggtcgttcgctccaagctgggctgtgtgcacgaaccccccgttcagcccgaccgctgcgccttatccggtaactatcgtcttgagtccaacccggtaagacacgacttatcgccactggcagcagccactggtaacaggattagcagagcgaggtatgtaggcggtgctacagagttcttgaagtggtggcctaactacggctacactagaagaacagtatttggtatctgcgctctgctgaagccagttaccttcggaaaaagagttggtagctcttgatccggcaaacaaaccaccgctggtagcggtggtttttttgtttgcaagcagcagattacgcgcagaaaaaaaggatctcaagaagatcctttgatcttttctacggggtctgacgctcagtggaacgaaaactcacgttaagggattttggtcatgagattatcaaaaaggatcttcacctagatccttttaaattaaaaatgaagttttaaatcaatctaaagtatatatgagtaaacttggtctgacagttaccaatgcttaatcagtgaggcacctatctcagcgatctgtctatttcgttcatccatagttgcctgactccccgtcgtgtagataactacgatacgggagggcttaccatctggccccagtgctgcaatgataccgcgagacccacgctcaccggctccagatttatcagcaataaaccagccagccggaagggccgagcgcagaagtggtcctgcaactttatccgcctccatccagtctattaattgttgccgggaagctagagtaagtagttcgccagttaatagtttgcgcaacgttgttgccattgctacaggcatcgtggtgtcacgctcgtcgtttggtatggcttcattcagctccggttcccaacgatcaaggcgagttacatgatcccccatgttgtgcaaaaaagcggttagctccttcggtcctccgatcgttgtcagaagtaagttggccgcagtgttatcactcatggttatggcagcactgcataattctcttactgtcatgccatccgtaagatgcttttctgtgactggtgagtactcaaccaagtcattctgagaatagtgtatgcggcgaccgagttgctcttgcccggcgtcaatacgggataataccgcgccacatagcagaactttaaaagtgctcatcattggaaaacgttcttcggggcgaaaactctcaaggatcttaccgctgttgagatccagttcgatgtaacccactcgtgcacccaactgatcttcagcatcttttactttcaccagcgtttctgggtgagcaaaaacaggaaggcaaaatgccgcaaaaaagggaataagggcgacacggaaatgttgaatactcatactcttcctttttcaatattattgaagcatttatcagggttattgtctcatgagcggatacatatttgaatgtatttagaaaaataaacaaataggggttccgcgcacatttccccgaaaagtgccacctgggtcgacattgattattgactagtaatagtaatcaattacggggtcattagttcatagcccatatatggagttccg

SEQ ID NO: 3988 - RNA, 6777 nt, Homo sapiens
  source 1..6777: mol_type = other RNA
aatcagtgaggcacctatctcagcgatctgtctatttcgttcatccatagttgcctgactccccgtcgtgtagataactacgatacgggagggcttaccatctggccccagtgctgcaatgataccgcgagacccacgctcaccggctccagatttatcagcaataaaccagccagccggaagggccgagcgcagaagtggtcctgcaactttatccgcctccatccagtctattaattgttgccgggaagctagagtaagtagttcgccagttaatagtttgcgcaacgttgttgccattgctacaggcatcgtggtgtcacgctcgtcgtttggtatggcttcattcagctccggttcccaacgatcaaggcgagttacatgatcccccatgttgtgcaaaaaagcggttagctccttcggtcctccgatcgttgtcagaagtaagttggccgcagtgttatcactcatggttatggcagcactgcataattctcttactgtcatgccatccgtaagatgcttttctgtgactggtgagtactcaaccaagtcattctgagaatagtgtatgcggcgaccgagttgctcttgcccggcgtcaatacgggataataccgcgccacatagcagaactttaaaagtgctcatcattggaaaacgttcttcggggcgaaaactctcaaggatcttaccgctgttgagatccagttcgatgtaacccactcgtgcacccaactgatcttcagcatcttttactttcaccagcgtttctgggtgagcaaaaacaggaaggcaaaatgccgcaaaaaagggaataagggcgacacggaaatgttgaatactcatactcttcctttttcaatattattgaagcatttatcagggttattgtctcatgagcggatacatatttgaatgtatttagaaaaataaacaaataggggttccgcgcacatttccccgaaaagtgccacctgacgtcgacggatcgggagatctcccgatcccctatggtgcactctcagtacaatctgctctgatgccgcatagttaagccagtatctgctccctgcttgtgtgttggaggtcgctgagtagtgcgcgagcaaaatttaagctacaacaaggcaaggcttgaccgacaattgcatgaagaatctgcttagggttaggcgttttgcgctgcttcgcgatgtacgggccagatatacgcgttgacattgattattgactagttattaatagtaatcaattacggggtcattagttcatagcccatatatggagttccgcgttacataacttacggtaaatggcccgcctggctgaccgcccaacgacccccgcccattgacgtcaataatgacgtatgttcccatagtaacgccaatagggactttccattgacgtcaatgggtggagtatttacggtaaactgcccacttggcagtacatcaagtgtatcatatgccaagtacgccccctattgacgtcaatgacggtaaatggcccgcctggcattatgcccagtacatgaccttatgggactttcctacttggcagtacatctacgtattagtcatcgctattaccatggtgatgcggttttggcagtacatcaatgggcgtggatagcggtttgactcacggggatttccaagtctccaccccattgacgtcaatgggagtttgttttggcaccaaaatcaacgggactttccaaaatgtcgtaacaactccgccccattgacgcaaatgggcggtaggcgtgtacggtgggaggtctatataagcagagctctctggctaactagagaacccactgcttactggcttatcgaaattaatacgactcactatagggagacccaagctggctagcgtttaaacttaagcttgccaccatgggatctccaaaaaagaaacggaaggtgggatctatgatcagaaacaaagccttcgtggtaaggctgtaccccaatgccgctcagaccgagctgatcaaccggacactcggcagcgccagatttgtgtacaaccattttctggccagacggatagctgcatataaagaaagcggcaagggactgacctacggacagacctctagcgagctgaccctgctgaagcaggccgaggaaacctcctggctgagcgaagtggataagttcgctctgcagaattctctgaagaacctggaaaccgcctataagaatttcttccggaccgttaagcagtctggcaaaaaggtgggatttcctcggttcagaaagaagcggaccggggagagctacagaactcagttcaccaacaacaacatccaaatcggcgagggcagactgaaactgccaaagctgggatgggtgaaaacaaagggccagcaagacatccagggcaagatcctgaacgtgaccgtgcgaagaatccacgagggccactacgaggccagcgtgctgtgcgaggtggaaatcccctacctgcctgccgcccctaaattcgccgccggagtggacgtgggcattaaggacttcgctatcgtgaccgacggcgtgcgctttaagcacgagcagaaccctaagtactaccggagcacactgaagagactccggaaggcccagcagacactgtctagaagaaaaaagggcagcgccagatacggcaaggccaagaccaaactggctagaatccacaagcggatcgtgaacaagcggcaagatttcctgcacaagctgacaacaagcctggtgagagaatacgagatcatcggtacagagcacctgaaacctgacaacatgagaaagaacagacggctggccctgagcatcagcgacgccggctggggcgagttcatcagacagctcgagtacaaggccgcctggtacggcagactggtgtccaaggtgtctccatacttccccagctcacagctgtgtcacgactgcggcttcaagaaccccgaggtgaagaacctggccgtgcgcacctggacctgtcctaattgcggcgaaacccatgatagagatgagaacgccgctcttaatatccggcgggaagccctggtcgccgctggcatcagcgacaccctgaacgcccacggcggctacgtgcggcctgcttccgccggcaacggcctgagaagcgaaaaccacgccacactggtcgtgggatccaaaaggccggcggccacgaaaaaggccggccaggcaaaaaagaaaaagggatcttacccatacgatgttccagattacgcttacccatacgatgttccagattacgcttacccatacgatgttccagattacgcttgagcggccgctcgagtctagagggcccgtttaaacccgctgatcagcctcgactgtgccttctagttgccagccatctgttgtttgcccctcccccgtgccttccttgaccctggaaggtgccactcccactgtcctttcctaataaaatgaggaaattgcatcgcattgtctgagtaggtgtcattctattctggggggtggggtggggcaggacagcaagggggaggattgggaagacaatagcaggcatgctggggatgcggtgggctctatggcttctgaggcggaaagaaccagctggggctctagggggtatccccacgcgccctgtagcggcgcattaagcgcggcgggtgtggtggttacgcgcagcgtgaccgctacacttgccagcgccctagcgcccgctcctttcgctttcttcccttcctttctcgccacgttcgccggctttccccgtcaagctctaaatcgggggctccctttagggttccgatttagtgctttacggcacctcgaccccaaaaaacttgattagggtgatggttcacgtagtgggccatcgccctgatagacggtttttcgccctttgacgttggagtccacgttctttaatagtggactcttgttccaaactggaacaacactcaaccctatctcggtctattcttttgatttataagggattttgccgatttcggcctattggttaaaaaatgagctgatttaacaaaaatttaacgcgaattaattctgtggaatgtgtgtcagttagggtgtggaaagtccccaggctccccagcaggcagaagtatgcaaagcatgcatctcaattagtcagcaaccaggtgtggaaagtccccaggctccccagcaggcagaagtatgcaaagcatgcatctcaattagtcagcaaccatagtcccgcccctaactccgcccatcccgcccctaactccgcccagttccgcccattctccgccccatggctgactaattttttttatttatgcagaggccgaggccgcctctgcctctgagctattccagaagtagtgaggaggcttttttggaggcctaggcttttgcaaaaagctcccgggagcttgtatatccattttcggatctgatcaagagacaggatgaggatcgtttcgcatgattgaacaagatggattgcacgcaggttctccggccgcttgggtggagaggctattcggctatgactgggcacaacagacaatcggctgctctgatgccgccgtgttccggctgtcagcgcaggggcgcccggttctttttgtcaagaccgacctgtccggtgccctgaatgaactgcaggacgaggcagcgcggctatcgtggctggccacgacgggcgttccttgcgcagctgtgctcgacgttgtcactgaagcgggaagggactggctgctattgggcgaagtgccggggcaggatctcctgtcatctcaccttgctcctgccgagaaagtatccatcatggctgatgcaatgcggcggctgcatacgcttgatccggctacctgcccattcgaccaccaagcgaaacatcgcatcgagcgagcacgtactcggatggaagccggtcttgtcgatcaggatgatctggacgaagagcatcaggggctcgcgccagccgaactgttcgccaggctcaaggcgcgcatgcccgacggcgaggatctcgtcgtgacccatggcgatgcctgcttgccgaatatcatggtggaaaatggccgcttttctggattcatcgactgtggccggctgggtgtggcggaccgctatcaggacatagcgttggctacccgtgatattgctgaagagcttggcggcgaatgggctgaccgcttcctcgtgctttacggtatcgccgctcccgattcgcagcgcatcgccttctatcgccttcttgacgagttcttctgagcgggactctggggttcgaaatgaccgaccaagcgacgcccaacctgccatcacgagatttcgattccaccgccgccttctatgaaaggttgggcttcggaatcgttttccgggacgccggctggatgatcctccagcgcggggatctcatgctggagttcttcgcccaccccaacttgtttattgcagcttataatggttacaaataaagcaatagcatcacaaatttcacaaataaagcatttttttcactgcattctagttgtggtttgtccaaactcatcaatgtatcttatcatgtctgtataccgtcgacctctagctagagcttggcgtaatcatggtcatagctgtttcctgtgtgaaattgttatccgctcacaattccacacaacatacgagccggaagcataaagtgtaaagcctggggtgcctaatgagtgagctaactcacattaattgcgttgcgctcactgcccgctttccagtcgggaaacctgtcgtgccagctgcattaatgaatcggccaacgcgcggggagaggcggtttgcgtattgggcgctcttccgcttcctcgctcactgactcgctgcgctcggtcgttcggctgcggcgagcggtatcagctcactcaaaggcggtaatacggttatccacagaatcaggggataacgcaggaaagaacatgtgagcaaaaggccagcaaaaggccaggaaccgtaaaaaggccgcgttgctggcgtttttccataggctccgcccccctgacgagcatcacaaaaatcgacgctcaagtcagaggtggcgaaacccgacaggactataaagataccaggcgtttccccctggaagctccctcgtgcgctctcctgttccgaccctgccgcttaccggatacctgtccgcctttctcccttcgggaagcgtggcgctttctcatagctcacgctgtaggtatctcagttcggtgtaggtcgttcgctccaagctgggctgtgtgcacgaaccccccgttcagcccgaccgctgcgccttatccggtaactatcgtcttgagtccaacccggtaagacacgacttatcgccactggcagcagccactggtaacaggattagcagagcgaggtatgtaggcggtgctacagagttcttgaagtggtggcctaactacggctacactagaagaacagtatttggtatctgcgctctgctgaagccagttaccttcggaaaaagagttggtagctcttgatccggcaaacaaaccaccgctggtagcggtttttttgtttgcaagcagcagattacgcgcagaaaaaaaggatctcaagaagatcctttgatcttttctacggggtctgacgctcagtggaacgaaaactcacgttaagggattttggtcatgagattatcaaaaaggatcttcacctagatccttttaaattaaaaatgaagttttaaatcaatctaaagtatatatgagtaaacttggtctgacagttaccaatgctt

SEQ ID NO: 3989 - RNA, 3042 nt, Homo sapiens
  source 1..3042: mol_type = other RNA
gttaccagtggctgctgccagtggcgataagtcgtgtcttaccgggttggactcaagacgatagttaccggataaggcgcagcggtcgggctgaacggggggttcgtgcacacagcccagcttggagcgaacgacctacaccgaactgagatacctacagcgtgagctatgagaaagcgccacgcttcccgaagggagaaaggcggacaggtatccggtaagcggcagggtcggaacaggagagcgcacgagggagcttccagggggaaacgcctggtatctttatagtcctgtcgggtttcgccacctctgacttgagcgtcgatttttgtgatgctcgtcaggggggcggagcctatggaaaaacgccagcaacgcggcctttttacggttcctggccttttgctggccttttgctcacatgttctttcctgcgttatcccctgattctgtggataaccgtattaccgcctttgagtgagctgataccgctcgccgcagccgaacgaccgagcgcagcgagtcagtgagcgaggaagcggaagagcgcccaatacgcaaaccgcctctccccgcgcgttggccgattcattaatgcagctggcacgacaggtttcccgactggaaagcgggcagtgagcgcaacgcaattaatgtgagttagctcactcattaggcaccccaggctttacactttatgcttccggctcgtatgttgtgtggaattgtgagcggataacaatttcacacaggaaacagctatgaccatgattacgccagagggcctatttcccatgattccttcatatttgcatatacgatacaaggctgttagagagataattggaattaatttgactgtaaacacaaagatattagtacaaaatacgtgacgtagaaagtaataatttcttgggtagtttgcagttttaaaattatgttttaaaatggactatcatatgcttaccgtaacttgaaagtatttcgatttcttggctttatatatcttgtggaaaggacgaaacaccggtggctgcgggaatctcagacaccttaaacgctcatggaggctatgtcagacctgcttcggcgggcaatggtctgcgaagtgagaatcacgcgactttagtcgtgtgaggttcaaatgtcttcctgggacgaagacaattttttggtaccgagctcgaattcactggccgtcgttttacaacgtcgtgactgggaaaaccctggcgttacccaacttaatcgccttgcagcacatccccctttcgccagctggcgtaatagcgaagaggcccgcaccgatcgcccttcccaacagttgcgcagcctgaatggcgaatggcgcctgatgcggtattttctccttacgcatctgtgcggtatttcacaccgcatatggtgcactctcagtacaatctgctctgatgccgcatagttaagccagccccgacacccgccaacacccgctgacgcgccctgacgggcttgtctgctcccggcatccgcttacagacaagctgtgaccgtctccgggagctgcatgtgtcagaggttttcaccgtcatcaccgaaacgcgcgagacgaaagggcctcgtgatacgcctatttttataggttaatgtcatgataataatggtttcttagacgtcaggtggcacttttcggggaaatgtgcgcggaacccctatttgtttatttttctaaatacattcaaatatgtatccgctcatgagacaataaccctgataaatgcttcaataatattgaaaaaggaagagtatgagtattcaacatttccgtgtcgcccttattcccttttttgcggcattttgccttcctgtttttgctcacccagaaacgctggtgaaagtaaaagatgctgaagatcagttgggtgcacgagtgggttacatcgaactggatctcaacagcggtaagatccttgagagttttcgccccgaagaacgttttccaatgatgagcacttttaaagttctgctatgtggcgcggtattatcccgtattgacgccgggcaagagcaactcggtcgccgcatacactattctcagaatgacttggttgagtactcaccagtcacagaaaagcatcttacggatggcatgacagtaagagaattatgcagtgctgccataaccatgagtgataacactgcggccaacttacttctgacaacgatcggaggaccgaaggagctaaccgcttttttgcacaacatgggggatcatgtaactcgccttgatcgttgggaaccggagctgaatgaagccataccaaacgacgagcgtgacaccacgatgcctgtagcaatggcaacaacgttgcgcaaactattaactggcgaactacttactctagcttcccggcaacaattaatagactggatggaggcggataaagttgcaggaccacttctgcgctcggcccttccggctggctggtttattgctgataaatctggagccggtgagcgtgggtctcgcggtatcattgcagcactggggccagatggtaagccctcccgtatcgtagttatctacacgacggggagtcaggcaactatggatgaacgaaatagacagatcgctgagataggtgcctcactgattaagcattggtaactgtcagaccaagtttactcatatatactttagattgatttaaaacttcatttttaatttaaaaggatctaggtgaagatcctttttgataatctcatgaccaaaatcccttaacgtgagttttcgttccactgagcgtcagaccccgtagaaaagatcaaaggatcttcttgagatcctttttttctgcgcgtaatctgctgcttgcaaacaaaaaaaccaccgctaccagcggtggtttgtttgccggatcaagagctaccaactctttttccgaaggtaactggcttcagcagagcgcagataccaaatactgttcttctagtgtagccgtagttaggccaccacttcaagaactctgtagcaccgcctacatacctcgctctgctaatcct

SEQ ID NO: 3990 - RNA, 10084 nt, Saccharomyces cerevisiae
  source 1..10084: mol_type = other RNA
gacgaaagggcctcgtgatacgcctatttttataggttaatgtcatgataataatggtttcttagtatgatccaatatcaaaggaaatgatagcattgaaggatgagactaatccaattgaggagtggcagcatatagaacagctaaagggtagtgctgaaggaagcatacgataccccgcatggaatgggataatatcacaggaggtactagactacctttcatcctacataaatagacgcatataagtacgcatttaagcataaacacgcactatgccgttcttctcatgtatatatatatacaggcaacacgcagatataggtgcgacgtgaacagtgagctgtatgtgcgcagctcgcgttgcattttcggaagcgctcgttttcggaaacgctttgaagttcctattccgaagttcctattctctagaaagtataggaacttcagagcgcttttgaaaaccaaaagcgctctgaagacgcactttcaaaaaaccaaaaacgcaccggactgtaacgagctactaaaatattgcgaataccgcttccacaaacattgctcaaaagtatctctttgctatatatctctgtgctatatccctatataacctacccatccacctttcgctccttgaacttgcatctaaactcgacctctacattttttatgtttatctctagtattactctttagacaaaaaaattgtagtaagaactattcatagagtgaatcgaaaacaatacgaaaatgtaaacatttcctatacgtagtatatagagacaaaatagaagaaaccgttcataattttctgaccaatgaagaatcatcaacgctatcactttctgttcacaaagtatgcgcaatccacatcggtatagaatataatcggggatgcctttatcttgaaaaaatgcacccgcagcttcgctagtaatcagtaaacgcgggaagtggagtcaggctttttttatggaagagaaaatagacaccaaagtagccttcttctaaccttaacggacctacagtgcaaaaagttatcaagagactgcattatagagcgcacaaaggagaaaaaaagtaatctaagatgctttgttagaaaaatagcgctctcgggatgcatttttgtagaacaaaaaagaagtatagattctttgttggtaaaatagcgctctcgcgttgcatttctgttctgtaaaaatgcagctcagattctttgtttgaaaaattagcgctctcgcgttgcatttttgttttacaaaaatgaagcacagattcttcgttggtaaaatagcgctttcgcgttgcatttctgttctgtaaaaatgcagctcagattctttgtttgaaaaattagcgctctcgcgttgcatttttgttctacaaaatgaagcacagatgcttcgttcaggtggcacttttcggggaaatgtgcgcggaacccctatttgtttatttttctaaatacattcaaatatgtatccgctcatgagacaataaccctgataaatgcttcaataatattgaaaaaggaagagtatgagtattcaacatttccgtgtcgcccttattcccttttttgcggcattttgccttcctgtttttgctcacccagaaacgctggtgaaagtaaaagatgctgaagatcagttgggtgcacgagtgggttacatcgaactggatctcaacagcggtaagatccttgagagttttcgccccgaagaacgttttccaatgatgagcacttttaaagttctgctatgtggcgcggtattatcccgtattgacgccgggcaagagcaactcggtcgccgcatacactattctcagaatgacttggttgagtactcaccagtcacagaaaagcatcttacggatggcatgacagtaagagaattatgcagtgctgccataaccatgagtgataacactgcggccaacttacttctgacaacgatcggaggaccgaaggagctaaccgcttttttgcacaacatgggggatcatgtaactcgccttgatcgttgggaaccggagctgaatgaagccataccaaacgacgagcgtgacaccacgatgcctgtagcaatggcaacaacgttgcgcaaactattaactggcgaactacttactctagcttcccggcaacaattaatagactggatggaggcggataaagttgcaggaccacttctgcgctcggcccttccggctggctggtttattgctgataaatctggagccggtgagcgtgggtctcgcggtatcattgcagcactggggccagatggtaagccctcccgtatcgtagttatctacacgacggggagtcaggcaactatggatgaacgaaatagacagatcgctgagataggtgcctcactgattaagcattggtaactgtcagaccaagtttactcatatatactttagattgatttaaaacttcatttttaatttaaaaggatctaggtgaagatcctttttgataatctcatgaccaaaatcccttaacgtgagttttcgttccactgagcgtcagaccccgtagaaaagatcaaaggatcttcttgagatcctttttttctgcgcgtaatctgctgcttgcaaacaaaaaaaccaccgctaccagcggtggtttgtttgccggatcaagagctaccaactctttttccgaaggtaactggcttcagcagagcgcagataccaaatactgttcttctagtgtagccgtagttaggccaccacttcaagaactctgtagcaccgcctacatacctcgctctgctaatcctgttaccagtggctgctgccagtggcgataagtcgtgtcttaccgggttggactcaagacgatagttaccggataaggcgcagcggtcgggctgaacggggggttcgtgcacacagcccagcttggagcgaacgacctacaccgaactgagatacctacagcgtgagctatgagaaagcgccacgcttcccgaagggagaaaggcggacaggtatccggtaagcggcagggtcggaacaggagagcgcacgagggagcttccagggggaaacgcctggtatctttatagtcctgtcgggtttcgccacctctgacttgagcgtcgatttttgtgatgctcgtcaggggggcggagcctatggaaaaacgccagcaacgcggcctttttacggttcctggccttttgctggccttttgctcacatgttctttcctgcgttatcccctgattctgtggataaccgtattaccgcctttgagtgagctgataccgctcgccgcagccgaacgaccgagcgcagcgagtcagtgagcgaggaagcggaagagcgcccaatacgcaaaccgcctctccccgcgcgttggccgattcattaatgcagctggcacgacaggtttcccgactggaaagcgggcagtgagcgcaacgcaattaatgtgagttagctcactcattaggcaccccaggctttacactttatgcttccggctcgtatgttgtgtggaattgtgagcggataacaatttcacacaggaaacagctatgaccatgattacgccaagcgcgcaattaaccctcactaaagggaacaaaagctggagctccaccgcggtggcggcccccgtcccaccatcgggcgcggatcatcacaagtttgtacaaaaaagcaggctctttggccatataggccaccaggtcctgcaggcgcgctcttcaggaggcgcgccaactgccctcttaattaacgaagaagatcggaccggggccgcggatctttgcaaagatccaaaaaaagcatgcgtacggattagaagccgccgagcgggtgacagccctccgaaggaagactctcctccgtgcgtcctcgtcttcaccggtcgcgttcctgaaacgcagatgtgcctcgcgccgcactgctccgaacaataaagattctacaatactagcttttatggttatgaagaggaaaattggcagtaacctggccccacaaacctcaaatgaacgaatcaaattaacaaccagatatctcgactgaaaaaaaaggtttaaaccagttccctgaaattattcccctacttgactaataagtatataaagacggtaggtattgattgtaattctgtaaatctatttcttaaacttcttgaattctacttttatagttagtcttttttttagttttaaaacaccaagaacttagtttcgaataaacacacataaataaaccatgaaatcttctcaccatcaccatcaccatcaccatcaccatggttcttctatgaaaatcgaagaaggtaaactggtaatctggattaacggcgataaaggctataacggtctcgctgaagtcggtaagaaattcgagaaagataccggaattaaagtcaccgttgagcatccggataaactggaagagaaattcccacaggttgcggcaactggcgatggccctgacattatcttctgggcacacgaccgctttggtggctacgctcaatctggcctgttggctgaaatcaccccggacaaagcgttccaggacaagctgtatccgtttacctgggatgccgtacgttacaacggcaagctgattgcttacccgatcgctgttgaagcgttatcgctgatttataacaaagatctgctgccgaacccgccaaaaacctgggaagagatcccggcgctggataaagaactgaaagcgaaaggtaagagcgcgctgatgttcaacctgcaagaaccgtacttcacctggccgctgattgctgctgacgggggttatgcgttcaagtatgaaaacggcaagtacgacattaaagacgtgggcgtggataacgctggcgcgaaagcgggtctgaccttcctggttgacctgattaaaaacaaacacatgaatgcagacaccgattactccatcgcagaagctgcctttaataaaggcgaaacagcgatgaccatcaacggcccgtgggcatggtccaacatcgacaccagcaaagtgaattatggtgtaacggtactgccgaccttcaagggtcaaccatccaaaccgttcgttggcgtgctgagcgcaggtattaacgccgccagtccgaacaaagagctggcaaaagagttcctcgaaaactatctgctgactgatgaaggtctggaagcggttaataaagacaaaccgctgggtgccgtagcgctgaagtcttacgaggaagagttggcgaaagatccacgtattgccgccactatggaaaacgcccagaaaggtgaaatcatgccgaacatcccgcagatgtccgctttctggtatgccgtgcgtactgcggtgatcaacgccgccagcggtcgtcagactgtcgatgaagccctgaaagacgcgcagactggcagcgaaaacctgtacttccaatccaatgcaccgccaaagaagaagcaaaagcttgaaaggctcaaaaaactcgacaaacccaccttacatacctgcaacaagacgtcctttgcaaaggctttcttgcctaatgagacctaccggcagcgtcttctagattacatcgccatcatccatcaactcgctgaccatgcttcccacgctctcaaattctacatcctctctacatccacatcgtctttcccggttgttcacgaagatacaatcgaagccattctctatcttctcaacaagggggaggcttggcatccaagaaaggaagcaaagaaggcatggcgggattgtttgttgccatatgttcaacggtactgccaaatcgtcggcttcattcatccaaatctacgaggcgagcagcagtcaattaattacctgacagtgagtatgatgacgaacctgaaagtcaacgttcaagagcatttcatgcagatgctgctccggtacattaatctgcggttcgacgtgaagggacagaagcagcgactgccaccgaaaagcgatgcgcgaaaggctttctttactcggctacgctacttgaagtcggttttcctttttgatgtggtgcccgagttggagttcctggatgacttgacaccattggagagcgaggttcttgaagagatttggtcattggatctcccattccttcctaacgatccccttgcctacgccattgttgctgatccgatgtcattttttcccgcgtactgcaaactctctgggctgtatgaacaatatggcttccaacggttcagtgcgatacctctgcgccgctcgctcattcaaagtcacgtgcgaatcgacaccatcatcctgtaccagcatatcctttgcatcacgcggcgagacgcagaaactgtcgaaaaggatgatctgtggatgcgcgtctgcaatctatgtaccaaggcttttcggtctcgctgtggtatgcattttgaaggctcaatcaccacggatggagcctcggtgtctgtatacctaaagcacccagaagcagacaagtatggaaagcgcggagcgagaaagtcagcaaacacggtggctgcagaggttaaagcgctttatgtggagaacaacttacctgcttgtcgagcagcagagaatgtcgtcgttatcgacccaaacaagcgcgacattctctactgccaagacagcaatggtacgacatttcgctacaccgccaaccagcgagccgtggagactggaagccggcggtttgcaaagagacgagaagcaatgaaggaagaagctggagttgatctcatagaatcacgaataccatcccacaaaacaatgaacctcatggacttcactcgctaccttctcgttcgccgcgctgattgggatcgtcgcaaggaattctattcgcatcctgctcatactcgatggaaatggcactccttcataaaccgtcagaagagcgaatcagacctcataagtaacatgcgcaacaagtacggtgaaaactttactgttgtgatgggtgattggagcgacgctggtcgaactgcgagatttcagacctcatcaaagacaaaaggctggcgcaccctctttaagcgcaaccgcattgattgtttccttctcgacgagtacaagacctcatctgtttgccctcgctgttcctcatctgagtttgtggagaaaaaattcaaaacacgacctcattcaagaccttggcgccgtcgtgaaggcaagattgaaaaagtccacggactgctgggttgtaccaaccctaactgtttgcagcaagcctggacatcgggaatgcgctactggaatcgagatatgctgtcaacctgcaacatgctattgattgtgagatcaatgttggatggacacggtagaccagaagtgttcagcaggagtgttccagccgtagcgtagaacgtagattggttagattaggttttccgagccggttgtcgcgcggttcaatccctggtgcgggtgctagtgccaatacccaccggctccgcactatctataggttatgaaatcaaattacaaataaatacatcaatgagacgagtgccctggtgcaagatctaccatctgcactactcttctcaataatcttgccattaattatcttagcagaccaactattccgtttgccttctttgggccacaaccgcggttgcctgaggcatcatatcgggaaaccatttcggccatacatatccatacatgacaacccaaaaagccaagcctgcaattgttcctgcgcttaagtcgactttgttcccactgtacttttagctcgtacaaaatacaatatacttttcatttctccgtaaacaacatgttttcccatgtaatatccttttctatttttcgttccgttaccaactttacacatactttatatagctattcacttctatacactaaaaaactaagacaattttaattttgctgcctgccatatttcaatttgttataaattcctataatttatcctattagtagctaaaaaaagatgaatgtgaatcgaatcctaagagaattcccctcgaagatcgatctggcggcccggccggccgcggccgcactcgagatatctagacccagctttcttgtacaaagtggtgatagcttgtcgagaagtactcgagggggggcccggtacccaattcgccctatagtgagtcgtattacgcgcgctcactggccgtcgttttacaacgtcgtgactgggaaaaccctggcgttacccaacttaatcgccttgcagcacatccccctttcgccagctggcgtaatagcgaagaggcccgcaccgatcgcccttcccaacagttgcgcagcctgaatggcgaatggacgcgccctgtagcggcgcattaagcgcggcgggtgtggtggttacgcgcagcgtgaccgctacacttgccagcgccctagcgcccgctcctttcgctttcttcccttcctttctcgccacgttcgccggctttccccgtcaagctctaaatcgggggctccctttagggttccgatttagtgctttacggcacctcgaccccaaaaaacttgattagggtgatggttcacgtagtgggccatcgccctgatagacggtttttcgccctttgacgttggagtccacgttctttaatagtggactcttgttccaaactggaacaacactcaaccctatctcggtctattcttttgatttataagggattttgccgatttcggcctattggttaaaaaatgagctgatttaacaaaaatttaacgcgaattttaacaaaatattaacgcttacaatttcctgatgcggtattttctccttacgcatctgtgcggtatttcacaccgcatagggtaataactgatataattaaattgaagctctaatttgtgagtttagtatacatgcatttacttataatacagttttttagttttgctggccgcatcttctcaaatatgcttcccagcctgcttttctgtaacgttcaccctctaccttagcatcccttccctttgcaaatagtcctcttccaacaataataatgtcagatcctgtagagaccacatcatccacggttctatactgttgacccaatgcgtctcccttgtcatctaaacccacaccgggtgtcataatcaaccaatcgtaaccttcatctcttccacccatgtctctttgagcaataaagccgataacaaaatctttgtcgctcttcgcaatgtcaacagtacccttagtatattctccagtagatagggagcccttgcatgacaattctgctaacatcaaaaggcctctaggttcctttgttacttcttctgccgcctgcttcaaaccgctaacaatacctgggcccaccacaccgtgtgcattcgtaatgtctgcccattctgctattctgtatacacccgcagagtactgcaatttgactgtattaccaatgtcagcaaattttctgtcttcgaagagtaaaaaattgtacttggcggataatgcctttagcggcttaactgtgccctccatggaaaaatcagtcaagatatccacatgtgtttttagtaaacaaattttgggacctaatgcttcaactaactccagtaattccttggtggtacgaacatccaatgaagcacacaagtttgtttgcttttcgtgcatgatattaaatagcttggcagcaacaggactaggatgagtagcagcacgttccttatatgtagctttcgacatgatttatcttcgtttcctgcaggtttttgttctgtgcagttgggttaagaatactgggcaatttcatgtttcttcaacactacatatgcgtatatataccaatctaagtctgtgctccttccttcgttcttccttctgttcggagattaccgaatcaaaaaaatttcaaggaaaccgaaatcaaaaaaaagaataaaaaaaaaatgatgaattgaaaaggtggtatggtgcactctcagtacaatctgctctgatgccgcatagttaagccagccccgacacccgccaacacccgctgacgcgccctgacgggcttgtctgctcccggcatccgcttacagacaagctgtgaccgtctccgggagctgcatgtgtcagaggttttcaccgtcatcaccgaaacgcgcga

SEQ ID NO: 3991 - RNA, 3038 nt, Homo sapiens
  source 1..3038: mol_type = other RNA
aattctgtggaatgtgtgtcagttagggtgtggaaagtccccaggctccccagcaggcagaagtatgcaaagcatgcatctcaattagtcagcaaccaggtgtggaaagtccccaggctccccagcaggcagaagtatgcaaagcatgcatctcaattagtcagcaaccatagtcccgcccctaactccgcccatcccgcccctaactccgcccagttccgcccattctccgccccatggctgactaattttttttatttatgcagaggccgaggccgcctctgcctctgagctattccagaagtagtgaggaggcttttttggaggcctaggcttttgcaaaaagctaacttgtttattgcagcttataatggttacaaataaagcaatagcatcacaaatttcacaaataaagcatttttttcactgcattctagttgtggtttgtccaaactcatcaatgtatcttatcatgtctgtataccgtcgacctctagctagagcttggcgtaatcatggtcatagctgtttcctgtgtgaaattgttatccgctcacaattccacacaacatacgagccggaagcataaagtgtaaagcctggggtgcctaatgagtgagctaactcacattaattgcgttgcgctcactgcccgctttccagtcgggaaacctgtcgtgccagctgcattaatgaatcggccaacgcgcggggagaggcggtttgcgtattgggcgctcttccgcttcctcgctcactgactcgctgcgctcggtcgttcggctgcggcgagcggtatcagctcactcaaaggcggtaatacggttatccacagaatcaggggataacgcaggaaagaacatgtgagcaaaaggccagcaaaaggccaggaaccgtaaaaaggccgcgttgctggcgtttttccataggctccgcccccctgacgagcatcacaaaaatcgacgctcaagtcagaggtggcgaaacccgacaggactataaagataccaggcgtttccccctggaagctccctcgtgcgctctcctgttccgaccctgccgcttaccggatacctgtccgcctttctcccttcgggaagcgtggcgctttctcatagctcacgctgtaggtatctcagttcggtgtaggtcgttcgctccaagctgggctgtgtgcacgaaccccccgttcagcccgaccgctgcgccttatccggtaactatcgtcttgagtccaacccggtaagacacgacttatcgccactggcagcagccactggtaacaggattagcagagcgaggtatgtaggcggtgctacagagttcttgaagtggtggcctaactacggctacactagaagaacagtatttggtatctgcgctctgctgaagccagttaccttcggaaaaagagttggtagctcttgatccggcaaacaaaccaccgctggtagcggtttttttgtttgcaagcagcagattacgcgcagaaaaaaaggatctcaagaagatcctttgatcttttctacggggtctgacgctcagtggaacgaaaactcacgttaagggattttggtcatgagattatcaaaaaggatcttcacctagatccttttaaattaaaaatgaagttttaaatcaatctaaagtatatatgagtaaacttggtctgacagttaccaatgcttaatcagtgaggcacctatctcagcgatctgtctatttcgttcatccatagttgcctgactccccgtcgtgtagataactacgatacgggagggcttaccatctggccccagtgctgcaatgataccgcgagacccacgctcaccggctccagatttatcagcaataaaccagccagccggaagggccgagcgcagaagtggtcctgcaactttatccgcctccatccagtctattaattgttgccgggaagctagagtaagtagttcgccagttaatagtttgcgcaacgttgttgccattgctacaggcatcgtggtgtcacgctcgtcgtttggtatggcttcattcagctccggttcccaacgatcaaggcgagttacatgatcccccatgttgtgcaaaaaagcggttagctccttcggtcctccgatcgttgtcagaagtaagttggccgcagtgttatcactcatggttatggcagcactgcataattctcttactgtcatgccatccgtaagatgcttttctgtgactggtgagtactcaaccaagtcattctgagaatagtgtatgcggcgaccgagttgctcttgcccggcgtcaatacgggataataccgcgccacatagcagaactttaaaagtgctcatcattggaaaacgttcttcggggcgaaaactctcaaggatcttaccgctgttgagatccagttcgatgtaacccactcgtgcacccaactgatcttcagcatcttttactttcaccagcgtttctgggtgagcaaaaacaggaaggcaaaatgccgcaaaaaagggaataagggcgacacggaaatgttgaatactcatactcttcctttttcaatattattgaagcatttatcagggttattgtctcatgagcggatacatatttgaatgtatttagaaaaataaacaaataggggttccgcgcacatttccccgaaaagtgccacctgagggcctatttcccatgattccttcatatttgcatatacgatacaaggctgttagagagataattagaattaatttgactgtaaacacaaagatattagtacaaaatacgtgacgtagaaagtaataatttcttgggtagtttgcagttttaaaattatgttttaaaatggactatcatatgcttaccgtaacttgaaagtatttcgatttcttggctttatatatcttgtggaaaggacagaaaacatgaggatcacccatgtctgcagttttccgagccggttgtcgcgcggttcaatccctggtgcgggtgctagtgccaatacccaccggctccgcactagcattccttaacacatcacttttttt

SEQ ID NO: 3992 - RNA, 3036 nt, Homo sapiens
  source 1..3036: mol_type = other RNA
aattctgtggaatgtgtgtcagttagggtgtggaaagtccccaggctccccagcaggcagaagtatgcaaagcatgcatctcaattagtcagcaaccaggtgtggaaagtccccaggctccccagcaggcagaagtatgcaaagcatgcatctcaattagtcagcaaccatagtcccgcccctaactccgcccatcccgcccctaactccgcccagttccgcccattctccgccccatggctgactaattttttttatttatgcagaggccgaggccgcctctgcctctgagctattccagaagtagtgaggaggcttttttggaggcctaggcttttgcaaaaagctaacttgtttattgcagcttataatggttacaaataaagcaatagcatcacaaatttcacaaataaagcatttttttcactgcattctagttgtggtttgtccaaactcatcaatgtatcttatcatgtctgtataccgtcgacctctagctagagcttggcgtaatcatggtcatagctgtttcctgtgtgaaattgttatccgctcacaattccacacaacatacgagccggaagcataaagtgtaaagcctggggtgcctaatgagtgagctaactcacattaattgcgttgcgctcactgcccgctttccagtcgggaaacctgtcgtgccagctgcattaatgaatcggccaacgcgcggggagaggcggtttgcgtattgggcgctcttccgcttcctcgctcactgactcgctgcgctcggtcgttcggctgcggcgagcggtatcagctcactcaaaggcggtaatacggttatccacagaatcaggggataacgcaggaaagaacatgtgagcaaaaggccagcaaaaggccaggaaccgtaaaaaggccgcgttgctggcgtttttccataggctccgcccccctgacgagcatcacaaaaatcgacgctcaagtcagaggtggcgaaacccgacaggactataaagataccaggcgtttccccctggaagctccctcgtgcgctctcctgttccgaccctgccgcttaccggatacctgtccgcctttctcccttcgggaagcgtggcgctttctcatagctcacgctgtaggtatctcagttcggtgtaggtcgttcgctccaagctgggctgtgtgcacgaaccccccgttcagcccgaccgctgcgccttatccggtaactatcgtcttgagtccaacccggtaagacacgacttatcgccactggcagcagccactggtaacaggattagcagagcgaggtatgtaggcggtgctacagagttcttgaagtggtggcctaactacggctacactagaagaacagtatttggtatctgcgctctgctgaagccagttaccttcggaaaaagagttggtagctcttgatccggcaaacaaaccaccgctggtagcggtttttttgtttgcaagcagcagattacgcgcagaaaaaaaggatctcaagaagatcctttgatcttttctacggggtctgacgctcagtggaacgaaaactcacgttaagggattttggtcatgagattatcaaaaaggatcttcacctagatccttttaaattaaaaatgaagttttaaatcaatctaaagtatatatgagtaaacttggtctgacagttaccaatgcttaatcagtgaggcacctatctcagcgatctgtctatttcgttcatccatagttgcctgactccccgtcgtgtagataactacgatacgggagggcttaccatctggccccagtgctgcaatgataccgcgagacccacgctcaccggctccagatttatcagcaataaaccagccagccggaagggccgagcgcagaagtggtcctgcaactttatccgcctccatccagtctattaattgttgccgggaagctagagtaagtagttcgccagttaatagtttgcgcaacgttgttgccattgctacaggcatcgtggtgtcacgctcgtcgtttggtatggcttcattcagctccggttcccaacgatcaaggcgagttacatgatcccccatgttgtgcaaaaaagcggttagctccttcggtcctccgatcgttgtcagaagtaagttggccgcagtgttatcactcatggttatggcagcactgcataattctcttactgtcatgccatccgtaagatgcttttctgtgactggtgagtactcaaccaagtcattctgagaatagtgtatgcggcgaccgagttgctcttgcccggcgtcaatacgggataataccgcgccacatagcagaactttaaaagtgctcatcattggaaaacgttcttcggggcgaaaactctcaaggatcttaccgctgttgagatccagttcgatgtaacccactcgtgcacccaactgatcttcagcatcttttactttcaccagcgtttctgggtgagcaaaaacaggaaggcaaaatgccgcaaaaaagggaataagggcgacacggaaatgttgaatactcatactcttcctttttcaatattattgaagcatttatcagggttattgtctcatgagcggatacatatttgaatgtatttagaaaaataaacaaataggggttccgcgcacatttccccgaaaagtgccacctgagggcctatttcccatgattccttcatatttgcatatacgatacaaggctgttagagagataattagaattaatttgactgtaaacacaaagatattagtacaaaatacgtgacgtagaaagtaataatttcttgggtagtttgcagttttaaaattatgttttaaaatggactatcatatgcttaccgtaacttgaaagtatttcgatttcttggctttatatatcttgtggaaaggacagaaaacatgaggatcacccatgtctgcagttttccgagccggttgtcgcgcggttcaatccctggtgcgggtgctagtccaataccaccggctccgcactagcattccttaacacatcacttttttt

SEQ ID NO: 3993 - RNA, 3034 nt, Homo sapiens
  source 1..3034: mol_type = other RNA
aattctgtggaatgtgtgtcagttagggtgtggaaagtccccaggctccccagcaggcagaagtatgcaaagcatgcatctcaattagtcagcaaccaggtgtggaaagtccccaggctccccagcaggcagaagtatgcaaagcatgcatctcaattagtcagcaaccatagtcccgcccctaactccgcccatcccgcccctaactccgcccagttccgcccattctccgccccatggctgactaattttttttatttatgcagaggccgaggccgcctctgcctctgagctattccagaagtagtgaggaggcttttttggaggcctaggcttttgcaaaaagctaacttgtttattgcagcttataatggttacaaataaagcaatagcatcacaaatttcacaaataaagcatttttttcactgcattctagttgtggtttgtccaaactcatcaatgtatcttatcatgtctgtataccgtcgacctctagctagagcttggcgtaatcatggtcatagctgtttcctgtgtgaaattgttatccgctcacaattccacacaacatacgagccggaagcataaagtgtaaagcctggggtgcctaatgagtgagctaactcacattaattgcgttgcgctcactgcccgctttccagtcgggaaacctgtcgtgccagctgcattaatgaatcggccaacgcgcggggagaggcggtttgcgtattgggcgctcttccgcttcctcgctcactgactcgctgcgctcggtcgttcggctgcggcgagcggtatcagctcactcaaaggcggtaatacggttatccacagaatcaggggataacgcaggaaagaacatgtgagcaaaaggccagcaaaaggccaggaaccgtaaaaaggccgcgttgctggcgtttttccataggctccgcccccctgacgagcatcacaaaaatcgacgctcaagtcagaggtggcgaaacccgacaggactataaagataccaggcgtttccccctggaagctccctcgtgcgctctcctgttccgaccctgccgcttaccggatacctgtccgcctttctcccttcgggaagcgtggcgctttctcatagctcacgctgtaggtatctcagttcggtgtaggtcgttcgctccaagctgggctgtgtgcacgaaccccccgttcagcccgaccgctgcgccttatccggtaactatcgtcttgagtccaacccggtaagacacgacttatcgccactggcagcagccactggtaacaggattagcagagcgaggtatgtaggcggtgctacagagttcttgaagtggtggcctaactacggctacactagaagaacagtatttggtatctgcgctctgctgaagccagttaccttcggaaaaagagttggtagctcttgatccggcaaacaaaccaccgctggtagcggtttttttgtttgcaagcagcagattacgcgcagaaaaaaaggatctcaagaagatcctttgatcttttctacggggtctgacgctcagtggaacgaaaactcacgttaagggattttggtcatgagattatcaaaaaggatcttcacctagatccttttaaattaaaaatgaagttttaaatcaatctaaagtatatatgagtaaacttggtctgacagttaccaatgcttaatcagtgaggcacctatctcagcgatctgtctatttcgttcatccatagttgcctgactccccgtcgtgtagataactacgatacgggagggcttaccatctggccccagtgctgcaatgataccgcgagacccacgctcaccggctccagatttatcagcaataaaccagccagccggaagggccgagcgcagaagtggtcctgcaactttatccgcctccatccagtctattaattgttgccgggaagctagagtaagtagttcgccagttaatagtttgcgcaacgttgttgccattgctacaggcatcgtggtgtcacgctcgtcgtttggtatggcttcattcagctccggttcccaacgatcaaggcgagttacatgatcccccatgttgtgcaaaaaagcggttagctccttcggtcctccgatcgttgtcagaagtaagttggccgcagtgttatcactcatggttatggcagcactgcataattctcttactgtcatgccatccgtaagatgcttttctgtgactggtgagtactcaaccaagtcattctgagaatagtgtatgcggcgaccgagttgctcttgcccggcgtcaatacgggataataccgcgccacatagcagaactttaaaagtgctcatcattggaaaacgttcttcggggcgaaaactctcaaggatcttaccgctgttgagatccagttcgatgtaacccactcgtgcacccaactgatcttcagcatcttttactttcaccagcgtttctgggtgagcaaaaacaggaaggcaaaatgccgcaaaaaagggaataagggcgacacggaaatgttgaatactcatactcttcctttttcaatattattgaagcatttatcagggttattgtctcatgagcggatacatatttgaatgtatttagaaaaataaacaaataggggttccgcgcacatttccccgaaaagtgccacctgagggcctatttcccatgattccttcatatttgcatatacgatacaaggctgttagagagataattagaattaatttgactgtaaacacaaagatattagtacaaaatacgtgacgtagaaagtaataatttcttgggtagtttgcagttttaaaattatgttttaaaatggactatcatatgcttaccgtaacttgaaagtatttcgatttcttggctttatatatcttgtggaaaggacagaaaacatgaggatcacccatgtctgcagttttccgagccggttgtcgcgcggttcaatccctggtgcgggtgctagccaataccccggctccgcactagcattccttaacacatcacttttttt

SEQ ID NO: 3994 - RNA, 3032 nt, Homo sapiens
  source 1..3032: mol_type = other RNA
aattctgtggaatgtgtgtcagttagggtgtggaaagtccccaggctccccagcaggcagaagtatgcaaagcatgcatctcaattagtcagcaaccaggtgtggaaagtccccaggctccccagcaggcagaagtatgcaaagcatgcatctcaattagtcagcaaccatagtcccgcccctaactccgcccatcccgcccctaactccgcccagttccgcccattctccgccccatggctgactaattttttttatttatgcagaggccgaggccgcctctgcctctgagctattccagaagtagtgaggaggcttttttggaggcctaggcttttgcaaaaagctaacttgtttattgcagcttataatggttacaaataaagcaatagcatcacaaatttcacaaataaagcatttttttcactgcattctagttgtggtttgtccaaactcatcaatgtatcttatcatgtctgtataccgtcgacctctagctagagcttggcgtaatcatggtcatagctgtttcctgtgtgaaattgttatccgctcacaattccacacaacatacgagccggaagcataaagtgtaaagcctggggtgcctaatgagtgagctaactcacattaattgcgttgcgctcactgcccgctttccagtcgggaaacctgtcgtgccagctgcattaatgaatcggccaacgcgcggggagaggcggtttgcgtattgggcgctcttccgcttcctcgctcactgactcgctgcgctcggtcgttcggctgcggcgagcggtatcagctcactcaaaggcggtaatacggttatccacagaatcaggggataacgcaggaaagaacatgtgagcaaaaggccagcaaaaggccaggaaccgtaaaaaggccgcgttgctggcgtttttccataggctccgcccccctgacgagcatcacaaaaatcgacgctcaagtcagaggtggcgaaacccgacaggactataaagataccaggcgtttccccctggaagctccctcgtgcgctctcctgttccgaccctgccgcttaccggatacctgtccgcctttctcccttcgggaagcgtggcgctttctcatagctcacgctgtaggtatctcagttcggtgtaggtcgttcgctccaagctgggctgtgtgcacgaaccccccgttcagcccgaccgctgcgccttatccggtaactatcgtcttgagtccaacccggtaagacacgacttatcgccactggcagcagccactggtaacaggattagcagagcgaggtatgtaggcggtgctacagagttcttgaagtggtggcctaactacggctacactagaagaacagtatttggtatctgcgctctgctgaagccagttaccttcggaaaaagagttggtagctcttgatccggcaaacaaaccaccgctggtagcggtttttttgtttgcaagcagcagattacgcgcagaaaaaaaggatctcaagaagatcctttgatcttttctacggggtctgacgctcagtggaacgaaaactcacgttaagggattttggtcatgagattatcaaaaaggatcttcacctagatccttttaaattaaaaatgaagttttaaatcaatctaaagtatatatgagtaaacttggtctgacagttaccaatgcttaatcagtgaggcacctatctcagcgatctgtctatttcgttcatccatagttgcctgactccccgtcgtgtagataactacgatacgggagggcttaccatctggccccagtgctgcaatgataccgcgagacccacgctcaccggctccagatttatcagcaataaaccagccagccggaagggccgagcgcagaagtggtcctgcaactttatccgcctccatccagtctattaattgttgccgggaagctagagtaagtagttcgccagttaatagtttgcgcaacgttgttgccattgctacaggcatcgtggtgtcacgctcgtcgtttggtatggcttcattcagctccggttcccaacgatcaaggcgagttacatgatcccccatgttgtgcaaaaaagcggttagctccttcggtcctccgatcgttgtcagaagtaagttggccgcagtgttatcactcatggttatggcagcactgcataattctcttactgtcatgccatccgtaagatgcttttctgtgactggtgagtactcaaccaagtcattctgagaatagtgtatgcggcgaccgagttgctcttgcccggcgtcaatacgggataataccgcgccacatagcagaactttaaaagtgctcatcattggaaaacgttcttcggggcgaaaactctcaaggatcttaccgctgttgagatccagttcgatgtaacccactcgtgcacccaactgatcttcagcatcttttactttcaccagcgtttctgggtgagcaaaaacaggaaggcaaaatgccgcaaaaaagggaataagggcgacacggaaatgttgaatactcatactcttcctttttcaatattattgaagcatttatcagggttattgtctcatgagcggatacatatttgaatgtatttagaaaaataaacaaataggggttccgcgcacatttccccgaaaagtgccacctgagggcctatttcccatgattccttcatatttgcatatacgatacaaggctgttagagagataattagaattaatttgactgtaaacacaaagatattagtacaaaatacgtgacgtagaaagtaataatttcttgggtagtttgcagttttaaaattatgttttaaaatggactatcatatgcttaccgtaacttgaaagtatttcgatttcttggctttatatatcttgtggaaaggacagaaaacatgaggatcacccatgtctgcagttttccgagccggttgtcgcgcggttcaatccctggtgcgggtgctaccaatacccggctccgcactagcattccttaacacatcacttttttt

SEQ ID NO: 3995 - RNA, 3030 nt, Homo sapiens
  source 1..3030: mol_type = other RNA
aattctgtggaatgtgtgtcagttagggtgtggaaagtccccaggctccccagcaggcagaagtatgcaaagcatgcatctcaattagtcagcaaccaggtgtggaaagtccccaggctccccagcaggcagaagtatgcaaagcatgcatctcaattagtcagcaaccatagtcccgcccctaactccgcccatcccgcccctaactccgcccagttccgcccattctccgccccatggctgactaattttttttatttatgcagaggccgaggccgcctctgcctctgagctattccagaagtagtgaggaggcttttttggaggcctaggcttttgcaaaaagctaacttgtttattgcagcttataatggttacaaataaagcaatagcatcacaaatttcacaaataaagcatttttttcactgcattctagttgtggtttgtccaaactcatcaatgtatcttatcatgtctgtataccgtcgacctctagctagagcttggcgtaatcatggtcatagctgtttcctgtgtgaaattgttatccgctcacaattccacacaacatacgagccggaagcataaagtgtaaagcctggggtgcctaatgagtgagctaactcacattaattgcgttgcgctcactgcccgctttccagtcgggaaacctgtcgtgccagctgcattaatgaatcggccaacgcgcggggagaggcggtttgcgtattgggcgctcttccgcttcctcgctcactgactcgctgcgctcggtcgttcggctgcggcgagcggtatcagctcactcaaaggcggtaatacggttatccacagaatcaggggataacgcaggaaagaacatgtgagcaaaaggccagcaaaaggccaggaaccgtaaaaaggccgcgttgctggcgtttttccataggctccgcccccctgacgagcatcacaaaaatcgacgctcaagtcagaggtggcgaaacccgacaggactataaagataccaggcgtttccccctggaagctccctcgtgcgctctcctgttccgaccctgccgcttaccggatacctgtccgcctttctcccttcgggaagcgtggcgctttctcatagctcacgctgtaggtatctcagttcggtgtaggtcgttcgctccaagctgggctgtgtgcacgaaccccccgttcagcccgaccgctgcgccttatccggtaactatcgtcttgagtccaacccggtaagacacgacttatcgccactggcagcagccactggtaacaggattagcagagcgaggtatgtaggcggtgctacagagttcttgaagtggtggcctaactacggctacactagaagaacagtatttggtatctgcgctctgctgaagccagttaccttcggaaaaagagttggtagctcttgatccggcaaacaaaccaccgctggtagcggtttttttgtttgcaagcagcagattacgcgcagaaaaaaaggatctcaagaagatcctttgatcttttctacggggtctgacgctcagtggaacgaaaactcacgttaagggattttggtcatgagattatcaaaaaggatcttcacctagatccttttaaattaaaaatgaagttttaaatcaatctaaagtatatatgagtaaacttggtctgacagttaccaatgcttaatcagtgaggcacctatctcagcgatctgtctatttcgttcatccatagttgcctgactccccgtcgtgtagataactacgatacgggagggcttaccatctggccccagtgctgcaatgataccgcgagacccacgctcaccggctccagatttatcagcaataaaccagccagccggaagggccgagcgcagaagtggtcctgcaactttatccgcctccatccagtctattaattgttgccgggaagctagagtaagtagttcgccagttaatagtttgcgcaacgttgttgccattgctacaggcatcgtggtgtcacgctcgtcgtttggtatggcttcattcagctccggttcccaacgatcaaggcgagttacatgatcccccatgttgtgcaaaaaagcggttagctccttcggtcctccgatcgttgtcagaagtaagttggccgcagtgttatcactcatggttatggcagcactgcataattctcttactgtcatgccatccgtaagatgcttttctgtgactggtgagtactcaaccaagtcattctgagaatagtgtatgcggcgaccgagttgctcttgcccggcgtcaatacgggataataccgcgccacatagcagaactttaaaagtgctcatcattggaaaacgttcttcggggcgaaaactctcaaggatcttaccgctgttgagatccagttcgatgtaacccactcgtgcacccaactgatcttcagcatcttttactttcaccagcgtttctgggtgagcaaaaacaggaaggcaaaatgccgcaaaaaagggaataagggcgacacggaaatgttgaatactcatactcttcctttttcaatattattgaagcatttatcagggttattgtctcatgagcggatacatatttgaatgtatttagaaaaataaacaaataggggttccgcgcacatttccccgaaaagtgccacctgagggcctatttcccatgattccttcatatttgcatatacgatacaaggctgttagagagataattagaattaatttgactgtaaacacaaagatattagtacaaaatacgtgacgtagaaagtaataatttcttgggtagtttgcagttttaaaattatgttttaaaatggactatcatatgcttaccgtaacttgaaagtatttcgatttcttggctttatatatcttgtggaaaggacagaaaacatgaggatcacccatgtctgcagttttccgagccggttgtcgcgcggttcaatccctggtgcgggtgctccaataccggctccgcactagcattccttaacacatcacttttttt

SEQ ID NO: 3996 - RNA, 3028 nt, Homo sapiens
  source 1..3028: mol_type = other RNA
aattctgtggaatgtgtgtcagttagggtgtggaaagtccccaggctccccagcaggcagaagtatgcaaagcatgcatctcaattagtcagcaaccaggtgtggaaagtccccaggctccccagcaggcagaagtatgcaaagcatgcatctcaattagtcagcaaccatagtcccgcccctaactccgcccatcccgcccctaactccgcccagttccgcccattctccgccccatggctgactaattttttttatttatgcagaggccgaggccgcctctgcctctgagctattccagaagtagtgaggaggcttttttggaggcctaggcttttgcaaaaagctaacttgtttattgcagcttataatggttacaaataaagcaatagcatcacaaatttcacaaataaagcatttttttcactgcattctagttgtggtttgtccaaactcatcaatgtatcttatcatgtctgtataccgtcgacctctagctagagcttggcgtaatcatggtcatagctgtttcctgtgtgaaattgttatccgctcacaattccacacaacatacgagccggaagcataaagtgtaaagcctggggtgcctaatgagtgagctaactcacattaattgcgttgcgctcactgcccgctttccagtcgggaaacctgtcgtgccagctgcattaatgaatcggccaacgcgcggggagaggcggtttgcgtattgggcgctcttccgcttcctcgctcactgactcgctgcgctcggtcgttcggctgcggcgagcggtatcagctcactcaaaggcggtaatacggttatccacagaatcaggggataacgcaggaaagaacatgtgagcaaaaggccagcaaaaggccaggaaccgtaaaaaggccgcgttgctggcgtttttccataggctccgcccccctgacgagcatcacaaaaatcgacgctcaagtcagaggtggcgaaacccgacaggactataaagataccaggcgtttccccctggaagctccctcgtgcgctctcctgttccgaccctgccgcttaccggatacctgtccgcctttctcccttcgggaagcgtggcgctttctcatagctcacgctgtaggtatctcagttcggtgtaggtcgttcgctccaagctgggctgtgtgcacgaaccccccgttcagcccgaccgctgcgccttatccggtaactatcgtcttgagtccaacccggtaagacacgacttatcgccactggcagcagccactggtaacaggattagcagagcgaggtatgtaggcggtgctacagagttcttgaagtggtggcctaactacggctacactagaagaacagtatttggtatctgcgctctgctgaagccagttaccttcggaaaaagagttggtagctcttgatccggcaaacaaaccaccgctggtagcggtttttttgtttgcaagcagcagattacgcgcagaaaaaaaggatctcaagaagatcctttgatcttttctacggggtctgacgctcagtggaacgaaaactcacgttaagggattttggtcatgagattatcaaaaaggatcttcacctagatccttttaaattaaaaatgaagttttaaatcaatctaaagtatatatgagtaaacttggtctgacagttaccaatgcttaatcagtgaggcacctatctcagcgatctgtctatttcgttcatccatagttgcctgactccccgtcgtgtagataactacgatacgggagggcttaccatctggccccagtgctgcaatgataccgcgagacccacgctcaccggctccagatttatcagcaataaaccagccagccggaagggccgagcgcagaagtggtcctgcaactttatccgcctccatccagtctattaattgttgccgggaagctagagtaagtagttcgccagttaatagtttgcgcaacgttgttgccattgctacaggcatcgtggtgtcacgctcgtcgtttggtatggcttcattcagctccggttcccaacgatcaaggcgagttacatgatcccccatgttgtgcaaaaaagcggttagctccttcggtcctccgatcgttgtcagaagtaagttggccgcagtgttatcactcatggttatggcagcactgcataattctcttactgtcatgccatccgtaagatgcttttctgtgactggtgagtactcaaccaagtcattctgagaatagtgtatgcggcgaccgagttgctcttgcccggcgtcaatacgggataataccgcgccacatagcagaactttaaaagtgctcatcattggaaaacgttcttcggggcgaaaactctcaaggatcttaccgctgttgagatccagttcgatgtaacccactcgtgcacccaactgatcttcagcatcttttactttcaccagcgtttctgggtgagcaaaaacaggaaggcaaaatgccgcaaaaaagggaataagggcgacacggaaatgttgaatactcatactcttcctttttcaatattattgaagcatttatcagggttattgtctcatgagcggatacatatttgaatgtatttagaaaaataaacaaataggggttccgcgcacatttccccgaaaagtgccacctgagggcctatttcccatgattccttcatatttgcatatacgatacaaggctgttagagagataattagaattaatttgactgtaaacacaaagatattagtacaaaatacgtgacgtagaaagtaataatttcttgggtagtttgcagttttaaaattatgttttaaaatggactatcatatgcttaccgtaacttgaaagtatttcgatttcttggctttatatatcttgtggaaaggacagaaaacatgaggatcacccatgtctgcagttttccgagccggttgtcgcgcggttcaatccctggtgcgggtgcccaataccgctccgcactagcattccttaacacatcacttttttt

SEQ ID NO: 3997 - RNA, 3026 nt, Homo sapiens
  source 1..3026: mol_type = other RNA
aattctgtggaatgtgtgtcagttagggtgtggaaagtccccaggctccccagcaggcagaagtatgcaaagcatgcatctcaattagtcagcaaccaggtgtggaaagtccccaggctccccagcaggcagaagtatgcaaagcatgcatctcaattagtcagcaaccatagtcccgcccctaactccgcccatcccgcccctaactccgcccagttccgcccattctccgccccatggctgactaattttttttatttatgcagaggccgaggccgcctctgcctctgagctattccagaagtagtgaggaggcttttttggaggcctaggcttttgcaaaaagctaacttgtttattgcagcttataatggttacaaataaagcaatagcatcacaaatttcacaaataaagcatttttttcactgcattctagttgtggtttgtccaaactcatcaatgtatcttatcatgtctgtataccgtcgacctctagctagagcttggcgtaatcatggtcatagctgtttcctgtgtgaaattgttatccgctcacaattccacacaacatacgagccggaagcataaagtgtaaagcctggggtgcctaatgagtgagctaactcacattaattgcgttgcgctcactgcccgctttccagtcgggaaacctgtcgtgccagctgcattaatgaatcggccaacgcgcggggagaggcggtttgcgtattgggcgctcttccgcttcctcgctcactgactcgctgcgctcggtcgttcggctgcggcgagcggtatcagctcactcaaaggcggtaatacggttatccacagaatcaggggataacgcaggaaagaacatgtgagcaaaaggccagcaaaaggccaggaaccgtaaaaaggccgcgttgctggcgtttttccataggctccgcccccctgacgagcatcacaaaaatcgacgctcaagtcagaggtggcgaaacccgacaggactataaagataccaggcgtttccccctggaagctccctcgtgcgctctcctgttccgaccctgccgcttaccggatacctgtccgcctttctcccttcgggaagcgtggcgctttctcatagctcacgctgtaggtatctcagttcggtgtaggtcgttcgctccaagctgggctgtgtgcacgaaccccccgttcagcccgaccgctgcgccttatccggtaactatcgtcttgagtccaacccggtaagacacgacttatcgccactggcagcagccactggtaacaggattagcagagcgaggtatgtaggcggtgctacagagttcttgaagtggtggcctaactacggctacactagaagaacagtatttggtatctgcgctctgctgaagccagttaccttcggaaaaagagttggtagctcttgatccggcaaacaaaccaccgctggtagcggtttttttgtttgcaagcagcagattacgcgcagaaaaaaaggatctcaagaagatcctttgatcttttctacggggtctgacgctcagtggaacgaaaactcacgttaagggattttggtcatgagattatcaaaaaggatcttcacctagatccttttaaattaaaaatgaagttttaaatcaatctaaagtatatatgagtaaacttggtctgacagttaccaatgcttaatcagtgaggcacctatctcagcgatctgtctatttcgttcatccatagttgcctgactccccgtcgtgtagataactacgatacgggagggcttaccatctggccccagtgctgcaatgataccgcgagacccacgctcaccggctccagatttatcagcaataaaccagccagccggaagggccgagcgcagaagtggtcctgcaactttatccgcctccatccagtctattaattgttgccgggaagctagagtaagtagttcgccagttaatagtttgcgcaacgttgttgccattgctacaggcatcgtggtgtcacgctcgtcgtttggtatggcttcattcagctccggttcccaacgatcaaggcgagttacatgatcccccatgttgtgcaaaaaagcggttagctccttcggtcctccgatcgttgtcagaagtaagttggccgcagtgttatcactcatggttatggcagcactgcataattctcttactgtcatgccatccgtaagatgcttttctgtgactggtgagtactcaaccaagtcattctgagaatagtgtatgcggcgaccgagttgctcttgcccggcgtcaatacgggataataccgcgccacatagcagaactttaaaagtgctcatcattggaaaacgttcttcggggcgaaaactctcaaggatcttaccgctgttgagatccagttcgatgtaacccactcgtgcacccaactgatcttcagcatcttttactttcaccagcgtttctgggtgagcaaaaacaggaaggcaaaatgccgcaaaaaagggaataagggcgacacggaaatgttgaatactcatactcttcctttttcaatattattgaagcatttatcagggttattgtctcatgagcggatacatatttgaatgtatttagaaaaataaacaaataggggttccgcgcacatttccccgaaaagtgccacctgagggcctatttcccatgattccttcatatttgcatatacgatacaaggctgttagagagataattagaattaatttgactgtaaacacaaagatattagtacaaaatacgtgacgtagaaagtaataatttcttgggtagtttgcagttttaaaattatgttttaaaatggactatcatatgcttaccgtaacttgaaagtatttcgatttcttggctttatatatcttgtggaaaggacagaaaacatgaggatcacccatgtctgcagttttccgagccggttgtcgcgcggttcaatccctggtgcgggtgccaataccctccgcactagcattccttaacacatcacttttttt

SEQ ID NO: 3998 - RNA, 3023 nt, Homo sapiens
  source 1..3023: mol_type = other RNA
aattctgtggaatgtgtgtcagttagggtgtggaaagtccccaggctccccagcaggcagaagtatgcaaagcatgcatctcaattagtcagcaaccaggtgtggaaagtccccaggctccccagcaggcagaagtatgcaaagcatgcatctcaattagtcagcaaccatagtcccgcccctaactccgcccatcccgcccctaactccgcccagttccgcccattctccgccccatggctgactaattttttttatttatgcagaggccgaggccgcctctgcctctgagctattccagaagtagtgaggaggcttttttggaggcctaggcttttgcaaaaagctaacttgtttattgcagcttataatggttacaaataaagcaatagcatcacaaatttcacaaataaagcatttttttcactgcattctagttgtggtttgtccaaactcatcaatgtatcttatcatgtctgtataccgtcgacctctagctagagcttggcgtaatcatggtcatagctgtttcctgtgtgaaattgttatccgctcacaattccacacaacatacgagccggaagcataaagtgtaaagcctggggtgcctaatgagtgagctaactcacattaattgcgttgcgctcactgcccgctttccagtcgggaaacctgtcgtgccagctgcattaatgaatcggccaacgcgcggggagaggcggtttgcgtattgggcgctcttccgcttcctcgctcactgactcgctgcgctcggtcgttcggctgcggcgagcggtatcagctcactcaaaggcggtaatacggttatccacagaatcaggggataacgcaggaaagaacatgtgagcaaaaggccagcaaaaggccaggaaccgtaaaaaggccgcgttgctggcgtttttccataggctccgcccccctgacgagcatcacaaaaatcgacgctcaagtcagaggtggcgaaacccgacaggactataaagataccaggcgtttccccctggaagctccctcgtgcgctctcctgttccgaccctgccgcttaccggatacctgtccgcctttctcccttcgggaagcgtggcgctttctcatagctcacgctgtaggtatctcagttcggtgtaggtcgttcgctccaagctgggctgtgtgcacgaaccccccgttcagcccgaccgctgcgccttatccggtaactatcgtcttgagtccaacccggtaagacacgacttatcgccactggcagcagccactggtaacaggattagcagagcgaggtatgtaggcggtgctacagagttcttgaagtggtggcctaactacggctacactagaagaacagtatttggtatctgcgctctgctgaagccagttaccttcggaaaaagagttggtagctcttgatccggcaaacaaaccaccgctggtagcggtttttttgtttgcaagcagcagattacgcgcagaaaaaaaggatctcaagaagatcctttgatcttttctacggggtctgacgctcagtggaacgaaaactcacgttaagggattttggtcatgagattatcaaaaaggatcttcacctagatccttttaaattaaaaatgaagttttaaatcaatctaaagtatatatgagtaaacttggtctgacagttaccaatgcttaatcagtgaggcacctatctcagcgatctgtctatttcgttcatccatagttgcctgactccccgtcgtgtagataactacgatacgggagggcttaccatctggccccagtgctgcaatgataccgcgagacccacgctcaccggctccagatttatcagcaataaaccagccagccggaagggccgagcgcagaagtggtcctgcaactttatccgcctccatccagtctattaattgttgccgggaagctagagtaagtagttcgccagttaatagtttgcgcaacgttgttgccattgctacaggcatcgtggtgtcacgctcgtcgtttggtatggcttcattcagctccggttcccaacgatcaaggcgagttacatgatcccccatgttgtgcaaaaaagcggttagctccttcggtcctccgatcgttgtcagaagtaagttggccgcagtgttatcactcatggttatggcagcactgcataattctcttactgtcatgccatccgtaagatgcttttctgtgactggtgagtactcaaccaagtcattctgagaatagtgtatgcggcgaccgagttgctcttgcccggcgtcaatacgggataataccgcgccacatagcagaactttaaaagtgctcatcattggaaaacgttcttcggggcgaaaactctcaaggatcttaccgctgttgagatccagttcgatgtaacccactcgtgcacccaactgatcttcagcatcttttactttcaccagcgtttctgggtgagcaaaaacaggaaggcaaaatgccgcaaaaaagggaataagggcgacacggaaatgttgaatactcatactcttcctttttcaatattattgaagcatttatcagggttattgtctcatgagcggatacatatttgaatgtatttagaaaaataaacaaataggggttccgcgcacatttccccgaaaagtgccacctgagggcctatttcccatgattccttcatatttgcatatacgatacaaggctgttagagagataattagaattaatttgactgtaaacacaaagatattagtacaaaatacgtgacgtagaaagtaataatttcttgggtagtttgcagttttaaaattatgttttaaaatggactatcatatgcttaccgtaacttgaaagtatttcgatttcttggctttatatatcttgtggaaaggacagaaaacatgaggatcacccatgtctgcagttttccgagccggttgtcgcgcggttcaatccctggtgcgggccaatacctccgcactagcattccttaacacatcacttttttt

SEQ ID NO: 3999 - RNA, 3021 nt, Homo sapiens
  source 1..3021: mol_type = other RNA
aattctgtggaatgtgtgtcagttagggtgtggaaagtccccaggctccccagcaggcagaagtatgcaaagcatgcatctcaattagtcagcaaccaggtgtggaaagtccccaggctccccagcaggcagaagtatgcaaagcatgcatctcaattagtcagcaaccatagtcccgcccctaactccgcccatcccgcccctaactccgcccagttccgcccattctccgccccatggctgactaattttttttatttatgcagaggccgaggccgcctctgcctctgagctattccagaagtagtgaggaggcttttttggaggcctaggcttttgcaaaaagctaacttgtttattgcagcttataatggttacaaataaagcaatagcatcacaaatttcacaaataaagcatttttttcactgcattctagttgtggtttgtccaaactcatcaatgtatcttatcatgtctgtataccgtcgacctctagctagagcttggcgtaatcatggtcatagctgtttcctgtgtgaaattgttatccgctcacaattccacacaacatacgagccggaagcataaagtgtaaagcctggggtgcctaatgagtgagctaactcacattaattgcgttgcgctcactgcccgctttccagtcgggaaacctgtcgtgccagctgcattaatgaatcggccaacgcgcggggagaggcggtttgcgtattgggcgctcttccgcttcctcgctcactgactcgctgcgctcggtcgttcggctgcggcgagcggtatcagctcactcaaaggcggtaatacggttatccacagaatcaggggataacgcaggaaagaacatgtgagcaaaaggccagcaaaaggccaggaaccgtaaaaaggccgcgttgctggcgtttttccataggctccgcccccctgacgagcatcacaaaaatcgacgctcaagtcagaggtggcgaaacccgacaggactataaagataccaggcgtttccccctggaagctccctcgtgcgctctcctgttccgaccctgccgcttaccggatacctgtccgcctttctcccttcgggaagcgtggcgctttctcatagctcacgctgtaggtatctcagttcggtgtaggtcgttcgctccaagctgggctgtgtgcacgaaccccccgttcagcccgaccgctgcgccttatccggtaactatcgtcttgagtccaacccggtaagacacgacttatcgccactggcagcagccactggtaacaggattagcagagcgaggtatgtaggcggtgctacagagttcttgaagtggtggcctaactacggctacactagaagaacagtatttggtatctgcgctctgctgaagccagttaccttcggaaaaagagttggtagctcttgatccggcaaacaaaccaccgctggtagcggtttttttgtttgcaagcagcagattacgcgcagaaaaaaaggatctcaagaagatcctttgatcttttctacggggtctgacgctcagtggaacgaaaactcacgttaagggattttggtcatgagattatcaaaaaggatcttcacctagatccttttaaattaaaaatgaagttttaaatcaatctaaagtatatatgagtaaacttggtctgacagttaccaatgcttaatcagtgaggcacctatctcagcgatctgtctatttcgttcatccatagttgcctgactccccgtcgtgtagataactacgatacgggagggcttaccatctggccccagtgctgcaatgataccgcgagacccacgctcaccggctccagatttatcagcaataaaccagccagccggaagggccgagcgcagaagtggtcctgcaactttatccgcctccatccagtctattaattgttgccgggaagctagagtaagtagttcgccagttaatagtttgcgcaacgttgttgccattgctacaggcatcgtggtgtcacgctcgtcgtttggtatggcttcattcagctccggttcccaacgatcaaggcgagttacatgatcccccatgttgtgcaaaaaagcggttagctccttcggtcctccgatcgttgtcagaagtaagttggccgcagtgttatcactcatggttatggcagcactgcataattctcttactgtcatgccatccgtaagatgcttttctgtgactggtgagtactcaaccaagtcattctgagaatagtgtatgcggcgaccgagttgctcttgcccggcgtcaatacgggataataccgcgccacatagcagaactttaaaagtgctcatcattggaaaacgttcttcggggcgaaaactctcaaggatcttaccgctgttgagatccagttcgatgtaacccactcgtgcacccaactgatcttcagcatcttttactttcaccagcgtttctgggtgagcaaaaacaggaaggcaaaatgccgcaaaaaagggaataagggcgacacggaaatgttgaatactcatactcttcctttttcaatattattgaagcatttatcagggttattgtctcatgagcggatacatatttgaatgtatttagaaaaataaacaaataggggttccgcgcacatttccccgaaaagtgccacctgagggcctatttcccatgattccttcatatttgcatatacgatacaaggctgttagagagataattagaattaatttgactgtaaacacaaagatattagtacaaaatacgtgacgtagaaagtaataatttcttgggtagtttgcagttttaaaattatgttttaaaatggactatcatatgcttaccgtaacttgaaagtatttcgatttcttggctttatatatcttgtggaaaggacagaaaacatgaggatcacccatgtctgcagttttccgagccggttgtcgcgcggttcaatccctggtgcggccaataccccgcactagcattccttaacacatcacttttttt

SEQ ID NO: 4000 - RNA, 3019 nt, Homo sapiens
  source 1..3019: mol_type = other RNA
aattctgtggaatgtgtgtcagttagggtgtggaaagtccccaggctccccagcaggcagaagtatgcaaagcatgcatctcaattagtcagcaaccaggtgtggaaagtccccaggctccccagcaggcagaagtatgcaaagcatgcatctcaattagtcagcaaccatagtcccgcccctaactccgcccatcccgcccctaactccgcccagttccgcccattctccgccccatggctgactaattttttttatttatgcagaggccgaggccgcctctgcctctgagctattccagaagtagtgaggaggcttttttggaggcctaggcttttgcaaaaagctaacttgtttattgcagcttataatggttacaaataaagcaatagcatcacaaatttcacaaataaagcatttttttcactgcattctagttgtggtttgtccaaactcatcaatgtatcttatcatgtctgtataccgtcgacctctagctagagcttggcgtaatcatggtcatagctgtttcctgtgtgaaattgttatccgctcacaattccacacaacatacgagccggaagcataaagtgtaaagcctggggtgcctaatgagtgagctaactcacattaattgcgttgcgctcactgcccgctttccagtcgggaaacctgtcgtgccagctgcattaatgaatcggccaacgcgcggggagaggcggtttgcgtattgggcgctcttccgcttcctcgctcactgactcgctgcgctcggtcgttcggctgcggcgagcggtatcagctcactcaaaggcggtaatacggttatccacagaatcaggggataacgcaggaaagaacatgtgagcaaaaggccagcaaaaggccaggaaccgtaaaaaggccgcgttgctggcgtttttccataggctccgcccccctgacgagcatcacaaaaatcgacgctcaagtcagaggtggcgaaacccgacaggactataaagataccaggcgtttccccctggaagctccctcgtgcgctctcctgttccgaccctgccgcttaccggatacctgtccgcctttctcccttcgggaagcgtggcgctttctcatagctcacgctgtaggtatctcagttcggtgtaggtcgttcgctccaagctgggctgtgtgcacgaaccccccgttcagcccgaccgctgcgccttatccggtaactatcgtcttgagtccaacccggtaagacacgacttatcgccactggcagcagccactggtaacaggattagcagagcgaggtatgtaggcggtgctacagagttcttgaagtggtggcctaactacggctacactagaagaacagtatttggtatctgcgctctgctgaagccagttaccttcggaaaaagagttggtagctcttgatccggcaaacaaaccaccgctggtagcggtttttttgtttgcaagcagcagattacgcgcagaaaaaaaggatctcaagaagatcctttgatcttttctacggggtctgacgctcagtggaacgaaaactcacgttaagggattttggtcatgagattatcaaaaaggatcttcacctagatccttttaaattaaaaatgaagttttaaatcaatctaaagtatatatgagtaaacttggtctgacagttaccaatgcttaatcagtgaggcacctatctcagcgatctgtctatttcgttcatccatagttgcctgactccccgtcgtgtagataactacgatacgggagggcttaccatctggccccagtgctgcaatgataccgcgagacccacgctcaccggctccagatttatcagcaataaaccagccagccggaagggccgagcgcagaagtggtcctgcaactttatccgcctccatccagtctattaattgttgccgggaagctagagtaagtagttcgccagttaatagtttgcgcaacgttgttgccattgctacaggcatcgtggtgtcacgctcgtcgtttggtatggcttcattcagctccggttcccaacgatcaaggcgagttacatgatcccccatgttgtgcaaaaaagcggttagctccttcggtcctccgatcgttgtcagaagtaagttggccgcagtgttatcactcatggttatggcagcactgcataattctcttactgtcatgccatccgtaagatgcttttctgtgactggtgagtactcaaccaagtcattctgagaatagtgtatgcggcgaccgagttgctcttgcccggcgtcaatacgggataataccgcgccacatagcagaactttaaaagtgctcatcattggaaaacgttcttcggggcgaaaactctcaaggatcttaccgctgttgagatccagttcgatgtaacccactcgtgcacccaactgatcttcagcatcttttactttcaccagcgtttctgggtgagcaaaaacaggaaggcaaaatgccgcaaaaaagggaataagggcgacacggaaatgttgaatactcatactcttcctttttcaatattattgaagcatttatcagggttattgtctcatgagcggatacatatttgaatgtatttagaaaaataaacaaataggggttccgcgcacatttccccgaaaagtgccacctgagggcctatttcccatgattccttcatatttgcatatacgatacaaggctgttagagagataattagaattaatttgactgtaaacacaaagatattagtacaaaatacgtgacgtagaaagtaataatttcttgggtagtttgcagttttaaaattatgttttaaaatggactatcatatgcttaccgtaacttgaaagtatttcgatttcttggctttatatatcttgtggaaaggacagaaaacatgaggatcacccatgtctgcagttttccgagccggttgtcgcgcggttcaatccctggtgcgccaatacccgcactagcattccttaacacatcacttttttt

SEQ ID NO: 4001 - RNA, 3017 nt, Homo sapiens
  source 1..3017: mol_type = other RNA
aattctgtggaatgtgtgtcagttagggtgtggaaagtccccaggctccccagcaggcagaagtatgcaaagcatgcatctcaattagtcagcaaccaggtgtggaaagtccccaggctccccagcaggcagaagtatgcaaagcatgcatctcaattagtcagcaaccatagtcccgcccctaactccgcccatcccgcccctaactccgcccagttccgcccattctccgccccatggctgactaattttttttatttatgcagaggccgaggccgcctctgcctctgagctattccagaagtagtgaggaggcttttttggaggcctaggcttttgcaaaaagctaacttgtttattgcagcttataatggttacaaataaagcaatagcatcacaaatttcacaaataaagcatttttttcactgcattctagttgtggtttgtccaaactcatcaatgtatcttatcatgtctgtataccgtcgacctctagctagagcttggcgtaatcatggtcatagctgtttcctgtgtgaaattgttatccgctcacaattccacacaacatacgagccggaagcataaagtgtaaagcctggggtgcctaatgagtgagctaactcacattaattgcgttgcgctcactgcccgctttccagtcgggaaacctgtcgtgccagctgcattaatgaatcggccaacgcgcggggagaggcggtttgcgtattgggcgctcttccgcttcctcgctcactgactcgctgcgctcggtcgttcggctgcggcgagcggtatcagctcactcaaaggcggtaatacggttatccacagaatcaggggataacgcaggaaagaacatgtgagcaaaaggccagcaaaaggccaggaaccgtaaaaaggccgcgttgctggcgtttttccataggctccgcccccctgacgagcatcacaaaaatcgacgctcaagtcagaggtggcgaaacccgacaggactataaagataccaggcgtttccccctggaagctccctcgtgcgctctcctgttccgaccctgccgcttaccggatacctgtccgcctttctcccttcgggaagcgtggcgctttctcatagctcacgctgtaggtatctcagttcggtgtaggtcgttcgctccaagctgggctgtgtgcacgaaccccccgttcagcccgaccgctgcgccttatccggtaactatcgtcttgagtccaacccggtaagacacgacttatcgccactggcagcagccactggtaacaggattagcagagcgaggtatgtaggcggtgctacagagttcttgaagtggtggcctaactacggctacactagaagaacagtatttggtatctgcgctctgctgaagccagttaccttcggaaaaagagttggtagctcttgatccggcaaacaaaccaccgctggtagcggtttttttgtttgcaagcagcagattacgcgcagaaaaaaaggatctcaagaagatcctttgatcttttctacggggtctgacgctcagtggaacgaaaactcacgttaagggattttggtcatgagattatcaaaaaggatcttcacctagatccttttaaattaaaaatgaagttttaaatcaatctaaagtatatatgagtaaacttggtctgacagttaccaatgcttaatcagtgaggcacctatctcagcgatctgtctatttcgttcatccatagttgcctgactccccgtcgtgtagataactacgatacgggagggcttaccatctggccccagtgctgcaatgataccgcgagacccacgctcaccggctccagatttatcagcaataaaccagccagccggaagggccgagcgcagaagtggtcctgcaactttatccgcctccatccagtctattaattgttgccgggaagctagagtaagtagttcgccagttaatagtttgcgcaacgttgttgccattgctacaggcatcgtggtgtcacgctcgtcgtttggtatggcttcattcagctccggttcccaacgatcaaggcgagttacatgatcccccatgttgtgcaaaaaagcggttagctccttcggtcctccgatcgttgtcagaagtaagttggccgcagtgttatcactcatggttatggcagcactgcataattctcttactgtcatgccatccgtaagatgcttttctgtgactggtgagtactcaaccaagtcattctgagaatagtgtatgcggcgaccgagttgctcttgcccggcgtcaatacgggataataccgcgccacatagcagaactttaaaagtgctcatcattggaaaacgttcttcggggcgaaaactctcaaggatcttaccgctgttgagatccagttcgatgtaacccactcgtgcacccaactgatcttcagcatcttttactttcaccagcgtttctgggtgagcaaaaacaggaaggcaaaatgccgcaaaaaagggaataagggcgacacggaaatgttgaatactcatactcttcctttttcaatattattgaagcatttatcagggttattgtctcatgagcggatacatatttgaatgtatttagaaaaataaacaaataggggttccgcgcacatttccccgaaaagtgccacctgagggcctatttcccatgattccttcatatttgcatatacgatacaaggctgttagagagataattagaattaatttgactgtaaacacaaagatattagtacaaaatacgtgacgtagaaagtaataatttcttgggtagtttgcagttttaaaattatgttttaaaatggactatcatatgcttaccgtaacttgaaagtatttcgatttcttggctttatatatcttgtggaaaggacagaaaacatgaggatcacccatgtctgcagttttccgagccggttgtcgcgcggttcaatccctggtgcccaataccgcactagcattccttaacacatcacttttttt

SEQ ID NO: 4002 - RNA, 3015 nt, Homo sapiens
  source 1..3015: mol_type = other RNA
aattctgtggaatgtgtgtcagttagggtgtggaaagtccccaggctccccagcaggcagaagtatgcaaagcatgcatctcaattagtcagcaaccaggtgtggaaagtccccaggctccccagcaggcagaagtatgcaaagcatgcatctcaattagtcagcaaccatagtcccgcccctaactccgcccatcccgcccctaactccgcccagttccgcccattctccgccccatggctgactaattttttttatttatgcagaggccgaggccgcctctgcctctgagctattccagaagtagtgaggaggcttttttggaggcctaggcttttgcaaaaagctaacttgtttattgcagcttataatggttacaaataaagcaatagcatcacaaatttcacaaataaagcatttttttcactgcattctagttgtggtttgtccaaactcatcaatgtatcttatcatgtctgtataccgtcgacctctagctagagcttggcgtaatcatggtcatagctgtttcctgtgtgaaattgttatccgctcacaattccacacaacatacgagccggaagcataaagtgtaaagcctggggtgcctaatgagtgagctaactcacattaattgcgttgcgctcactgcccgctttccagtcgggaaacctgtcgtgccagctgcattaatgaatcggccaacgcgcggggagaggcggtttgcgtattgggcgctcttccgcttcctcgctcactgactcgctgcgctcggtcgttcggctgcggcgagcggtatcagctcactcaaaggcggtaatacggttatccacagaatcaggggataacgcaggaaagaacatgtgagcaaaaggccagcaaaaggccaggaaccgtaaaaaggccgcgttgctggcgtttttccataggctccgcccccctgacgagcatcacaaaaatcgacgctcaagtcagaggtggcgaaacccgacaggactataaagataccaggcgtttccccctggaagctccctcgtgcgctctcctgttccgaccctgccgcttaccggatacctgtccgcctttctcccttcgggaagcgtggcgctttctcatagctcacgctgtaggtatctcagttcggtgtaggtcgttcgctccaagctgggctgtgtgcacgaaccccccgttcagcccgaccgctgcgccttatccggtaactatcgtcttgagtccaacccggtaagacacgacttatcgccactggcagcagccactggtaacaggattagcagagcgaggtatgtaggcggtgctacagagttcttgaagtggtggcctaactacggctacactagaagaacagtatttggtatctgcgctctgctgaagccagttaccttcggaaaaagagttggtagctcttgatccggcaaacaaaccaccgctggtagcggtttttttgtttgcaagcagcagattacgcgcagaaaaaaaggatctcaagaagatcctttgatcttttctacggggtctgacgctcagtggaacgaaaactcacgttaagggattttggtcatgagattatcaaaaaggatcttcacctagatccttttaaattaaaaatgaagttttaaatcaatctaaagtatatatgagtaaacttggtctgacagttaccaatgcttaatcagtgaggcacctatctcagcgatctgtctatttcgttcatccatagttgcctgactccccgtcgtgtagataactacgatacgggagggcttaccatctggccccagtgctgcaatgataccgcgagacccacgctcaccggctccagatttatcagcaataaaccagccagccggaagggccgagcgcagaagtggtcctgcaactttatccgcctccatccagtctattaattgttgccgggaagctagagtaagtagttcgccagttaatagtttgcgcaacgttgttgccattgctacaggcatcgtggtgtcacgctcgtcgtttggtatggcttcattcagctccggttcccaacgatcaaggcgagttacatgatcccccatgttgtgcaaaaaagcggttagctccttcggtcctccgatcgttgtcagaagtaagttggccgcagtgttatcactcatggttatggcagcactgcataattctcttactgtcatgccatccgtaagatgcttttctgtgactggtgagtactcaaccaagtcattctgagaatagtgtatgcggcgaccgagttgctcttgcccggcgtcaatacgggataataccgcgccacatagcagaactttaaaagtgctcatcattggaaaacgttcttcggggcgaaaactctcaaggatcttaccgctgttgagatccagttcgatgtaacccactcgtgcacccaactgatcttcagcatcttttactttcaccagcgtttctgggtgagcaaaaacaggaaggcaaaatgccgcaaaaaagggaataagggcgacacggaaatgttgaatactcatactcttcctttttcaatattattgaagcatttatcagggttattgtctcatgagcggatacatatttgaatgtatttagaaaaataaacaaataggggttccgcgcacatttccccgaaaagtgccacctgagggcctatttcccatgattccttcatatttgcatatacgatacaaggctgttagagagataattagaattaatttgactgtaaacacaaagatattagtacaaaatacgtgacgtagaaagtaataatttcttgggtagtttgcagttttaaaattatgttttaaaatggactatcatatgcttaccgtaacttgaaagtatttcgatttcttggctttatatatcttgtggaaaggacagaaaacatgaggatcacccatgtctgcagttttccgagccggttgtcgcgcggttcaatccctggtgccaatacccactagcattccttaacacatcacttttttt

SEQ ID NO: 4003 - RNA, 3013 nt, Homo sapiens
  source 1..3013: mol_type = other RNA
aattctgtggaatgtgtgtcagttagggtgtggaaagtccccaggctccccagcaggcagaagtatgcaaagcatgcatctcaattagtcagcaaccaggtgtggaaagtccccaggctccccagcaggcagaagtatgcaaagcatgcatctcaattagtcagcaaccatagtcccgcccctaactccgcccatcccgcccctaactccgcccagttccgcccattctccgccccatggctgactaattttttttatttatgcagaggccgaggccgcctctgcctctgagctattccagaagtagtgaggaggcttttttggaggcctaggcttttgcaaaaagctaacttgtttattgcagcttataatggttacaaataaagcaatagcatcacaaatttcacaaataaagcatttttttcactgcattctagttgtggtttgtccaaactcatcaatgtatcttatcatgtctgtataccgtcgacctctagctagagcttggcgtaatcatggtcatagctgtttcctgtgtgaaattgttatccgctcacaattccacacaacatacgagccggaagcataaagtgtaaagcctggggtgcctaatgagtgagctaactcacattaattgcgttgcgctcactgcccgctttccagtcgggaaacctgtcgtgccagctgcattaatgaatcggccaacgcgcggggagaggcggtttgcgtattgggcgctcttccgcttcctcgctcactgactcgctgcgctcggtcgttcggctgcggcgagcggtatcagctcactcaaaggcggtaatacggttatccacagaatcaggggataacgcaggaaagaacatgtgagcaaaaggccagcaaaaggccaggaaccgtaaaaaggccgcgttgctggcgtttttccataggctccgcccccctgacgagcatcacaaaaatcgacgctcaagtcagaggtggcgaaacccgacaggactataaagataccaggcgtttccccctggaagctccctcgtgcgctctcctgttccgaccctgccgcttaccggatacctgtccgcctttctcccttcgggaagcgtggcgctttctcatagctcacgctgtaggtatctcagttcggtgtaggtcgttcgctccaagctgggctgtgtgcacgaaccccccgttcagcccgaccgctgcgccttatccggtaactatcgtcttgagtccaacccggtaagacacgacttatcgccactggcagcagccactggtaacaggattagcagagcgaggtatgtaggcggtgctacagagttcttgaagtggtggcctaactacggctacactagaagaacagtatttggtatctgcgctctgctgaagccagttaccttcggaaaaagagttggtagctcttgatccggcaaacaaaccaccgctggtagcggtttttttgtttgcaagcagcagattacgcgcagaaaaaaaggatctcaagaagatcctttgatcttttctacggggtctgacgctcagtggaacgaaaactcacgttaagggattttggtcatgagattatcaaaaaggatcttcacctagatccttttaaattaaaaatgaagttttaaatcaatctaaagtatatatgagtaaacttggtctgacagttaccaatgcttaatcagtgaggcacctatctcagcgatctgtctatttcgttcatccatagttgcctgactccccgtcgtgtagataactacgatacgggagggcttaccatctggccccagtgctgcaatgataccgcgagacccacgctcaccggctccagatttatcagcaataaaccagccagccggaagggccgagcgcagaagtggtcctgcaactttatccgcctccatccagtctattaattgttgccgggaagctagagtaagtagttcgccagttaatagtttgcgcaacgttgttgccattgctacaggcatcgtggtgtcacgctcgtcgtttggtatggcttcattcagctccggttcccaacgatcaaggcgagttacatgatcccccatgttgtgcaaaaaagcggttagctccttcggtcctccgatcgttgtcagaagtaagttggccgcagtgttatcactcatggttatggcagcactgcataattctcttactgtcatgccatccgtaagatgcttttctgtgactggtgagtactcaaccaagtcattctgagaatagtgtatgcggcgaccgagttgctcttgcccggcgtcaatacgggataataccgcgccacatagcagaactttaaaagtgctcatcattggaaaacgttcttcggggcgaaaactctcaaggatcttaccgctgttgagatccagttcgatgtaacccactcgtgcacccaactgatcttcagcatcttttactttcaccagcgtttctgggtgagcaaaaacaggaaggcaaaatgccgcaaaaaagggaataagggcgacacggaaatgttgaatactcatactcttcctttttcaatattattgaagcatttatcagggttattgtctcatgagcggatacatatttgaatgtatttagaaaaataaacaaataggggttccgcgcacatttccccgaaaagtgccacctgagggcctatttcccatgattccttcatatttgcatatacgatacaaggctgttagagagataattagaattaatttgactgtaaacacaaagatattagtacaaaatacgtgacgtagaaagtaataatttcttgggtagtttgcagttttaaaattatgttttaaaatggactatcatatgcttaccgtaacttgaaagtatttcgatttcttggctttatatatcttgtggaaaggacagaaaacatgaggatcacccatgtctgcagttttccgagccggttgtcgcgcggttcaatccctggtccaataccactagcattccttaacacatcacttttttt

SEQ ID NO: 4004 - RNA, 3011 nt, Homo sapiens
  source 1..3011: mol_type = other RNA
aattctgtggaatgtgtgtcagttagggtgtggaaagtccccaggctccccagcaggcagaagtatgcaaagcatgcatctcaattagtcagcaaccaggtgtggaaagtccccaggctccccagcaggcagaagtatgcaaagcatgcatctcaattagtcagcaaccatagtcccgcccctaactccgcccatcccgcccctaactccgcccagttccgcccattctccgccccatggctgactaattttttttatttatgcagaggccgaggccgcctctgcctctgagctattccagaagtagtgaggaggcttttttggaggcctaggcttttgcaaaaagctaacttgtttattgcagcttataatggttacaaataaagcaatagcatcacaaatttcacaaataaagcatttttttcactgcattctagttgtggtttgtccaaactcatcaatgtatcttatcatgtctgtataccgtcgacctctagctagagcttggcgtaatcatggtcatagctgtttcctgtgtgaaattgttatccgctcacaattccacacaacatacgagccggaagcataaagtgtaaagcctggggtgcctaatgagtgagctaactcacattaattgcgttgcgctcactgcccgctttccagtcgggaaacctgtcgtgccagctgcattaatgaatcggccaacgcgcggggagaggcggtttgcgtattgggcgctcttccgcttcctcgctcactgactcgctgcgctcggtcgttcggctgcggcgagcggtatcagctcactcaaaggcggtaatacggttatccacagaatcaggggataacgcaggaaagaacatgtgagcaaaaggccagcaaaaggccaggaaccgtaaaaaggccgcgttgctggcgtttttccataggctccgcccccctgacgagcatcacaaaaatcgacgctcaagtcagaggtggcgaaacccgacaggactataaagataccaggcgtttccccctggaagctccctcgtgcgctctcctgttccgaccctgccgcttaccggatacctgtccgcctttctcccttcgggaagcgtggcgctttctcatagctcacgctgtaggtatctcagttcggtgtaggtcgttcgctccaagctgggctgtgtgcacgaaccccccgttcagcccgaccgctgcgccttatccggtaactatcgtcttgagtccaacccggtaagacacgacttatcgccactggcagcagccactggtaacaggattagcagagcgaggtatgtaggcggtgctacagagttcttgaagtggtggcctaactacggctacactagaagaacagtatttggtatctgcgctctgctgaagccagttaccttcggaaaaagagttggtagctcttgatccggcaaacaaaccaccgctggtagcggtttttttgtttgcaagcagcagattacgcgcagaaaaaaaggatctcaagaagatcctttgatcttttctacggggtctgacgctcagtggaacgaaaactcacgttaagggattttggtcatgagattatcaaaaaggatcttcacctagatccttttaaattaaaaatgaagttttaaatcaatctaaagtatatatgagtaaacttggtctgacagttaccaatgcttaatcagtgaggcacctatctcagcgatctgtctatttcgttcatccatagttgcctgactccccgtcgtgtagataactacgatacgggagggcttaccatctggccccagtgctgcaatgataccgcgagacccacgctcaccggctccagatttatcagcaataaaccagccagccggaagggccgagcgcagaagtggtcctgcaactttatccgcctccatccagtctattaattgttgccgggaagctagagtaagtagttcgccagttaatagtttgcgcaacgttgttgccattgctacaggcatcgtggtgtcacgctcgtcgtttggtatggcttcattcagctccggttcccaacgatcaaggcgagttacatgatcccccatgttgtgcaaaaaagcggttagctccttcggtcctccgatcgttgtcagaagtaagttggccgcagtgttatcactcatggttatggcagcactgcataattctcttactgtcatgccatccgtaagatgcttttctgtgactggtgagtactcaaccaagtcattctgagaatagtgtatgcggcgaccgagttgctcttgcccggcgtcaatacgggataataccgcgccacatagcagaactttaaaagtgctcatcattggaaaacgttcttcggggcgaaaactctcaaggatcttaccgctgttgagatccagttcgatgtaacccactcgtgcacccaactgatcttcagcatcttttactttcaccagcgtttctgggtgagcaaaaacaggaaggcaaaatgccgcaaaaaagggaataagggcgacacggaaatgttgaatactcatactcttcctttttcaatattattgaagcatttatcagggttattgtctcatgagcggatacatatttgaatgtatttagaaaaataaacaaataggggttccgcgcacatttccccgaaaagtgccacctgagggcctatttcccatgattccttcatatttgcatatacgatacaaggctgttagagagataattagaattaatttgactgtaaacacaaagatattagtacaaaatacgtgacgtagaaagtaataatttcttgggtagtttgcagttttaaaattatgttttaaaatggactatcatatgcttaccgtaacttgaaagtatttcgatttcttggctttatatatcttgtggaaaggacagaaaacatgaggatcacccatgtctgcagttttccgagccggttgtcgcgcggttcaatccctggccaataccctagcattccttaacacatcacttttttt

SEQ ID NO: 4005 - RNA, 3009 nt, Homo sapiens
  source 1..3009: mol_type = other RNA
aattctgtggaatgtgtgtcagttagggtgtggaaagtccccaggctccccagcaggcagaagtatgcaaagcatgcatctcaattagtcagcaaccaggtgtggaaagtccccaggctccccagcaggcagaagtatgcaaagcatgcatctcaattagtcagcaaccatagtcccgcccctaactccgcccatcccgcccctaactccgcccagttccgcccattctccgccccatggctgactaattttttttatttatgcagaggccgaggccgcctctgcctctgagctattccagaagtagtgaggaggcttttttggaggcctaggcttttgcaaaaagctaacttgtttattgcagcttataatggttacaaataaagcaatagcatcacaaatttcacaaataaagcatttttttcactgcattctagttgtggtttgtccaaactcatcaatgtatcttatcatgtctgtataccgtcgacctctagctagagcttggcgtaatcatggtcatagctgtttcctgtgtgaaattgttatccgctcacaattccacacaacatacgagccggaagcataaagtgtaaagcctggggtgcctaatgagtgagctaactcacattaattgcgttgcgctcactgcccgctttccagtcgggaaacctgtcgtgccagctgcattaatgaatcggccaacgcgcggggagaggcggtttgcgtattgggcgctcttccgcttcctcgctcactgactcgctgcgctcggtcgttcggctgcggcgagcggtatcagctcactcaaaggcggtaatacggttatccacagaatcaggggataacgcaggaaagaacatgtgagcaaaaggccagcaaaaggccaggaaccgtaaaaaggccgcgttgctggcgtttttccataggctccgcccccctgacgagcatcacaaaaatcgacgctcaagtcagaggtggcgaaacccgacaggactataaagataccaggcgtttccccctggaagctccctcgtgcgctctcctgttccgaccctgccgcttaccggatacctgtccgcctttctcccttcgggaagcgtggcgctttctcatagctcacgctgtaggtatctcagttcggtgtaggtcgttcgctccaagctgggctgtgtgcacgaaccccccgttcagcccgaccgctgcgccttatccggtaactatcgtcttgagtccaacccggtaagacacgacttatcgccactggcagcagccactggtaacaggattagcagagcgaggtatgtaggcggtgctacagagttcttgaagtggtggcctaactacggctacactagaagaacagtatttggtatctgcgctctgctgaagccagttaccttcggaaaaagagttggtagctcttgatccggcaaacaaaccaccgctggtagcggtttttttgtttgcaagcagcagattacgcgcagaaaaaaaggatctcaagaagatcctttgatcttttctacggggtctgacgctcagtggaacgaaaactcacgttaagggattttggtcatgagattatcaaaaaggatcttcacctagatccttttaaattaaaaatgaagttttaaatcaatctaaagtatatatgagtaaacttggtctgacagttaccaatgcttaatcagtgaggcacctatctcagcgatctgtctatttcgttcatccatagttgcctgactccccgtcgtgtagataactacgatacgggagggcttaccatctggccccagtgctgcaatgataccgcgagacccacgctcaccggctccagatttatcagcaataaaccagccagccggaagggccgagcgcagaagtggtcctgcaactttatccgcctccatccagtctattaattgttgccgggaagctagagtaagtagttcgccagttaatagtttgcgcaacgttgttgccattgctacaggcatcgtggtgtcacgctcgtcgtttggtatggcttcattcagctccggttcccaacgatcaaggcgagttacatgatcccccatgttgtgcaaaaaagcggttagctccttcggtcctccgatcgttgtcagaagtaagttggccgcagtgttatcactcatggttatggcagcactgcataattctcttactgtcatgccatccgtaagatgcttttctgtgactggtgagtactcaaccaagtcattctgagaatagtgtatgcggcgaccgagttgctcttgcccggcgtcaatacgggataataccgcgccacatagcagaactttaaaagtgctcatcattggaaaacgttcttcggggcgaaaactctcaaggatcttaccgctgttgagatccagttcgatgtaacccactcgtgcacccaactgatcttcagcatcttttactttcaccagcgtttctgggtgagcaaaaacaggaaggcaaaatgccgcaaaaaagggaataagggcgacacggaaatgttgaatactcatactcttcctttttcaatattattgaagcatttatcagggttattgtctcatgagcggatacatatttgaatgtatttagaaaaataaacaaataggggttccgcgcacatttccccgaaaagtgccacctgagggcctatttcccatgattccttcatatttgcatatacgatacaaggctgttagagagataattagaattaatttgactgtaaacacaaagatattagtacaaaatacgtgacgtagaaagtaataatttcttgggtagtttgcagttttaaaattatgttttaaaatggactatcatatgcttaccgtaacttgaaagtatttcgatttcttggctttatatatcttgtggaaaggacagaaaacatgaggatcacccatgtctgcagttttccgagccggttgtcgcgcggttcaatccctgccaatacctagcattccttaacacatcacttttttt

SEQ ID NO: 4006 - RNA, 3007 nt, Homo sapiens
  source 1..3007: mol_type = other RNA
aattctgtggaatgtgtgtcagttagggtgtggaaagtccccaggctccccagcaggcagaagtatgcaaagcatgcatctcaattagtcagcaaccaggtgtggaaagtccccaggctccccagcaggcagaagtatgcaaagcatgcatctcaattagtcagcaaccatagtcccgcccctaactccgcccatcccgcccctaactccgcccagttccgcccattctccgccccatggctgactaattttttttatttatgcagaggccgaggccgcctctgcctctgagctattccagaagtagtgaggaggcttttttggaggcctaggcttttgcaaaaagctaacttgtttattgcagcttataatggttacaaataaagcaatagcatcacaaatttcacaaataaagcatttttttcactgcattctagttgtggtttgtccaaactcatcaatgtatcttatcatgtctgtataccgtcgacctctagctagagcttggcgtaatcatggtcatagctgtttcctgtgtgaaattgttatccgctcacaattccacacaacatacgagccggaagcataaagtgtaaagcctggggtgcctaatgagtgagctaactcacattaattgcgttgcgctcactgcccgctttccagtcgggaaacctgtcgtgccagctgcattaatgaatcggccaacgcgcggggagaggcggtttgcgtattgggcgctcttccgcttcctcgctcactgactcgctgcgctcggtcgttcggctgcggcgagcggtatcagctcactcaaaggcggtaatacggttatccacagaatcaggggataacgcaggaaagaacatgtgagcaaaaggccagcaaaaggccaggaaccgtaaaaaggccgcgttgctggcgtttttccataggctccgcccccctgacgagcatcacaaaaatcgacgctcaagtcagaggtggcgaaacccgacaggactataaagataccaggcgtttccccctggaagctccctcgtgcgctctcctgttccgaccctgccgcttaccggatacctgtccgcctttctcccttcgggaagcgtggcgctttctcatagctcacgctgtaggtatctcagttcggtgtaggtcgttcgctccaagctgggctgtgtgcacgaaccccccgttcagcccgaccgctgcgccttatccggtaactatcgtcttgagtccaacccggtaagacacgacttatcgccactggcagcagccactggtaacaggattagcagagcgaggtatgtaggcggtgctacagagttcttgaagtggtggcctaactacggctacactagaagaacagtatttggtatctgcgctctgctgaagccagttaccttcggaaaaagagttggtagctcttgatccggcaaacaaaccaccgctggtagcggtttttttgtttgcaagcagcagattacgcgcagaaaaaaaggatctcaagaagatcctttgatcttttctacggggtctgacgctcagtggaacgaaaactcacgttaagggattttggtcatgagattatcaaaaaggatcttcacctagatccttttaaattaaaaatgaagttttaaatcaatctaaagtatatatgagtaaacttggtctgacagttaccaatgcttaatcagtgaggcacctatctcagcgatctgtctatttcgttcatccatagttgcctgactccccgtcgtgtagataactacgatacgggagggcttaccatctggccccagtgctgcaatgataccgcgagacccacgctcaccggctccagatttatcagcaataaaccagccagccggaagggccgagcgcagaagtggtcctgcaactttatccgcctccatccagtctattaattgttgccgggaagctagagtaagtagttcgccagttaatagtttgcgcaacgttgttgccattgctacaggcatcgtggtgtcacgctcgtcgtttggtatggcttcattcagctccggttcccaacgatcaaggcgagttacatgatcccccatgttgtgcaaaaaagcggttagctccttcggtcctccgatcgttgtcagaagtaagttggccgcagtgttatcactcatggttatggcagcactgcataattctcttactgtcatgccatccgtaagatgcttttctgtgactggtgagtactcaaccaagtcattctgagaatagtgtatgcggcgaccgagttgctcttgcccggcgtcaatacgggataataccgcgccacatagcagaactttaaaagtgctcatcattggaaaacgttcttcggggcgaaaactctcaaggatcttaccgctgttgagatccagttcgatgtaacccactcgtgcacccaactgatcttcagcatcttttactttcaccagcgtttctgggtgagcaaaaacaggaaggcaaaatgccgcaaaaaagggaataagggcgacacggaaatgttgaatactcatactcttcctttttcaatattattgaagcatttatcagggttattgtctcatgagcggatacatatttgaatgtatttagaaaaataaacaaataggggttccgcgcacatttccccgaaaagtgccacctgagggcctatttcccatgattccttcatatttgcatatacgatacaaggctgttagagagataattagaattaatttgactgtaaacacaaagatattagtacaaaatacgtgacgtagaaagtaataatttcttgggtagtttgcagttttaaaattatgttttaaaatggactatcatatgcttaccgtaacttgaaagtatttcgatttcttggctttatatatcttgtggaaaggacagaaaacatgaggatcacccatgtctgcagttttccgagccggttgtcgcgcggttcaatccctccaataccagcattccttaacacatcacttttttt

SEQ ID NO: 4007 - RNA, 20 nt, unidentified
  source 1..20: mol_type = other RNA
  misc_feature 1..20: note = FZID16_guide1
gcattccttaacacatcact

SEQ ID NO: 4008 - RNA, 54 nt, unidentified
  source 1..54: mol_type = other RNA
  misc_feature 1..54: note = FZID16_guide1
ctttccctacacgacgctcttccgatctgcagtatcttctgtcactggagattg

SEQ ID NO: 4009 - RNA, 54 nt, unidentified; identical to SEQ ID NO: 4008
  misc_feature 1..54: note = FZID16_guide1
  source 1..54: mol_type = other RNA

SEQ ID NO: 4010 - RNA, 20 nt, unidentified
  misc_feature 1..20: note = FZID16_guide2
  source 1..20: mol_type = other RNA
aatgtacaaacgtttgaact

SEQ ID NO: 4011 - RNA, 48 nt, unidentified
  misc_feature 1..48: note = FZID16_guide2
  source 1..48: mol_type = other RNA
ctttccctacacgacgctcttccgatctagcaaagtgacgccgagggc

SEQ ID NO: 4012 - RNA, 59 nt, unidentified
  source 1..59: mol_type = other RNA
  misc_feature 1..59: note = FZID16_guide2
gactggagttcagacgtgtgctcttccgatcttcacagagaaaaagattccaatcctgc

SEQ ID NO: 4013 - RNA, 20 nt, unidentified
  misc_feature 1..20: note = FZID16_guide3
  source 1..20: mol_type = other RNA
ccccttccaaggccagggag

SEQ ID NO: 4014 - RNA, 49 nt, unidentified
  source 1..49: mol_type = other RNA
  misc_feature 1..49: note = FZID16_guide3
ctttccctacacgacgctcttccgatcttcagccccctcacccattccc

SEQ ID NO: 4015 - RNA, 55 nt, unidentified
  source 1..55: mol_type = other RNA
  misc_feature 1..55: note = FZID16_guide3
gactggagttcagacgtgtgctcttccgatctgcaagttcctcagaccctggcac

SEQ ID NO: 4016 - RNA, 20 nt, unidentified
  misc_feature 1..20: note = FZID16_guide4
  source 1..20: mol_type = other RNA
tccattaaaaagtatatctt

SEQ ID NO: 4017 - RNA, 51 nt, unidentified
  source 1..51: mol_type = other RNA
  misc_feature 1..51: note = FZID16_guide4
ctttccctacacgacgctcttccgatctcaaaaggtgcaaagtcccctcgc

SEQ ID NO: 4018 - RNA, 60 nt, unidentified
  misc_feature 1..60: note = FZID16_guide4
  source 1..60: mol_type = other RNA
gactggagttcagacgtgtgctcttccgatcttcaaaacatgctgccatctttatcacac

SEQ ID NO: 4019 - RNA, 20 nt, unidentified
  source 1..20: mol_type = other RNA
  misc_feature 1..20: note = FZID16_guide5
gtataaaaataggctggccg

SEQ ID NO: 4020 - RNA, 56 nt, unidentified
  source 1..56: mol_type = other RNA
  misc_feature 1..56: note = FZID16_guide5
ctttccctacacgacgctcttccgatcttggcaaatattttctgtaaagggccaag

SEQ ID NO: 4021 - RNA, 58 nt, unidentified
  misc_feature 1..58: note = FZID16_guide5
  source 1..58: mol_type = other RNA
gactggagttcagacgtgtgctcttccgatctgtagagacggggtttcaaccacgttg

SEQ ID NO: 4022 - RNA, 20 nt, unidentified
  misc_feature 1..20: note = FZID16_guide6
  source 1..20: mol_type = other RNA
aaatcaaatataaataaatt

SEQ ID NO: 4023 - RNA, 56 nt, unidentified
  source 1..56: mol_type = other RNA
  misc_feature 1..56: note = FZID16_guide6
ctttccctacacgacgctcttccgatctgcctgtgattaaccataggcgtatggtc

SEQ ID NO: 4024 - RNA, 55 nt, unidentified
  source 1..55: mol_type = other RNA
  misc_feature 1..55: note = FZID16_guide6
gactggagttcagacgtgtgctcttccgatctgcccccttccagtcaatcccaac

SEQ ID NO: 4025 - RNA, 20 nt, unidentified
  misc_feature 1..20: note = FZID16_guide7
  source 1..20: mol_type = other RNA
actccctaataaaatgtgca

SEQ ID NO: 4026 - RNA, 57 nt, unidentified
  source 1..57: mol_type = other RNA
  misc_feature 1..57: note = FZID16_guide7
ctttccctacacgacgctcttccgatctgcatgtttctcgagtgtagtctgttagcc

SEQ ID NO: 4027 - RNA, 53 nt, unidentified
  source 1..53: mol_type = other RNA
  misc_feature 1..53: note = FZID16_guide7
gactggagttcagacgtgtgctcttccgatcttggccctcagcaagcagtaag

SEQ ID NO: 4028 - RNA, 20 nt, unidentified
  source 1..20: mol_type = other RNA
  misc_feature 1..20: note = FZID16_guide8
tcgacacactgaattctgcc

SEQ ID NO: 4029 - RNA, 53 nt, unidentified
  misc_feature 1..53: note = FZID16_guide8
  source 1..53: mol_type = other RNA
ctttccctacacgacgctcttccgatctgcaaggcggggattaaaggtagtgc

SEQ ID NO: 4030 - RNA, 59 nt, unidentified
  misc_feature 1..59: note = FZID16_guide8
  source 1..59: mol_type = other RNA
gactggagttcagacgtgtgctcttccgatctgagaattcgacatactttcttctctgc

SEQ ID NO: 4031 - RNA, 20 nt, unidentified
  misc_feature 1..20: note = FZID16_guide9
  source 1..20: mol_type = other RNA
tatttacacacgcccatgca

SEQ ID NO: 4032 - RNA, 51 nt, unidentified
  misc_feature 1..51: note = FZID16_guide9
  source 1..51: mol_type = other RNA
ctttccctacacgacgctcttccgatctgtgggagctgagtccctatgctg

SEQ ID NO: 4033 - RNA, 57 nt, unidentified
  source 1..57: mol_type = other RNA
  misc_feature 1..57: note = FZID16_guide9
gactggagttcagacgtgtgctcttccgatcttcccaacacacacactggagactcc

SEQ ID NO: 4034 - RNA, 20 nt, unidentified
  misc_feature 1..20: note = FZID16_guide10
  source 1..20: mol_type = other RNA
atatgaacaaacaatagtgg

SEQ ID NO: 4035 - RNA, 56 nt, unidentified
  source 1..56: mol_type = other RNA
  misc_feature 1..56: note = FZID16_guide10
ctttccctacacgacgctcttccgatctttagatgagaatggtcatgatcttgctg

SEQ ID NO: 4036 - RNA, 58 nt, unidentified
  source 1..58: mol_type = other RNA
  misc_feature 1..58: note = FZID16_guide10
gactggagttcagacgtgtgctcttccgatctagagtatcaagggagtgtttcatagg

SEQ ID NO: 4037 - RNA, 20 nt, unidentified
  misc_feature 1..20: note = FZID16_guide11
  source 1..20: mol_type = other RNA
taaagagagatagaggtggt

SEQ ID NO: 4038 - RNA, 54 nt, unidentified
  source 1..54: mol_type = other RNA
  misc_feature 1..54: note = FZID16_guide11
ctttccctacacgacgctcttccgatcttcatcttgaattatttgggtgggccc

SEQ ID NO: 4039 - RNA, 56 nt, unidentified
  source 1..56: mol_type = other RNA
  misc_feature 1..56: note = FZID16_guide11
gactggagttcagacgtgtgctcttccgatcttaaggctgcagaagactcgggggc

SEQ ID NO: 4040 - RNA, 20 nt, unidentified
  misc_feature 1..20: note = FZID16_guide12
  source 1..20: mol_type = other RNA
tgatggaaattctcttactt

SEQ ID NO: 4041 - RNA, 55 nt, unidentified
  source 1..55: mol_type = other RNA
  misc_feature 1..55: note = FZID16_guide12
ctttccctacacgacgctcttccgatctgcaaagccagtaagagaatcgctgaag

SEQ ID NO: 4042 - RNA, 58 nt, unidentified
  misc_feature 1..58: note = FZID16_guide12
  source 1..58: mol_type = other RNA
gactggagttcagacgtgtgctcttccgatctcagttccttggtggctgagttgggag

SEQ ID NO: 4043 - RNA, 20 nt, unidentified
  misc_feature 1..20: note = FZID35_guide1
  source 1..20: mol_type = other RNA
tcacctgtctccaagccagc

SEQ ID NO: 4044 - RNA, 49 nt, unidentified
  source 1..49: mol_type = other RNA
  misc_feature 1..49: note = FZID35_guide1
ctttccctacacgacgctcttccgatctgatagcctccaggccagaaag

SEQ ID NO: 4045 - RNA, 54 nt, unidentified
  misc_feature 1..54: note = FZID35_guide1
  source 1..54: mol_type = other RNA
gactggagttcagacgtgtgctcttccgatctacccagtctagtgcatgccttc

SEQ ID NO: 4046 - RNA, 20 nt, unidentified
  misc_feature 1..20: note = FZID35_guide2
  source 1..20: mol_type = other RNA
aaaggagttttcttgaccat

SEQ ID NO: 4047 - RNA, 53 nt, unidentified
  source 1..53: mol_type = other RNA
  misc_feature 1..53: note = FZID35_guide2
ctttccctacacgacgctcttccgatctcaaacgtttgaacttagagcgcagc

SEQ ID NO: 4048 - RNA, 55 nt, unidentified
  source 1..55: mol_type = other RNA
  misc_feature 1..55: note = FZID35_guide2
gactggagttcagacgtgtgctcttccgatcttacgtttgcaaacagcgtgcaag

SEQ ID NO: 4049 - RNA, 20 nt, unidentified
  source 1..20: mol_type = other RNA
  misc_feature 1..20: note = FZID35_guide3
gcccaacccatggcacccac

SEQ ID NO: 4050 - RNA, 55 nt, unidentified
  source 1..55: mol_type = other RNA
  misc_feature 1..55: note = FZID35_guide3
ctttccctacacgacgctcttccgatctgaatgactggaggcagcttgctgaatg

SEQ ID NO: 4051 - RNA, 53 nt, unidentified
  source 1..53: mol_type = other RNA
  misc_feature 1..53: note = FZID35_guide3
gactggagttcagacgtgtgctcttccgatctgctaaagtagggtgtgatggg

SEQ ID NO: 4052 - RNA, 20 nt, unidentified
  misc_feature 1..20: note = FZID35_guide4
  source 1..20: mol_type = other RNA
ggccttcagaaagttgttga

SEQ ID NO: 4053 - RNA, 50 nt, unidentified
  misc_feature 1..50: note = FZID35_guide4
  source 1..50: mol_type = other RNA
ctttccctacacgacgctcttccgatctctggtacagtaccaactgggtg

SEQ ID NO: 4054 - RNA, 57 nt, unidentified
  misc_feature 1..57: note = FZID35_guide4
  source 1..57: mol_type = other RNA
gactggagttcagacgtgtgctcttccgatctgctagcattaggatcaactttgttg

SEQ ID NO: 4055 - RNA, 20 nt, unidentified
  misc_feature 1..20: note = FZID35_guide5
  source 1..20: mol_type = other RNA
cctgaaatagacttaaacat

SEQ ID NO: 4056 - RNA, 54 nt, unidentified
  source 1..54: mol_type = other RNA
  misc_feature 1..54: note = FZID35_guide5
ctttccctacacgacgctcttccgatctcccctcgtctcttttatactaccctc

SEQ ID NO: 4057 - RNA, 57 nt, unidentified
  misc_feature 1..57: note = FZID35_guide5
  source 1..57: mol_type = other RNA
gactggagttcagacgtgtgctcttccgatctggaggtttcagtgagccgataccgc

SEQ ID NO: 4058 - RNA, 20 nt, unidentified
  source 1..20: mol_type = other RNA
  misc_feature 1..20: note = FZID35_guide6
tagacagcgccagaccttca

SEQ ID NO: 4059 - RNA, 49 nt, unidentified
  source 1..49: mol_type = other RNA
  misc_feature 1..49: note = FZID35_guide6
ctttccctacacgacgctcttccgatctgaaagttgcggagggtgggag

SEQ ID NO: 4060 - RNA, 52 nt, unidentified
  misc_feature 1..52: note = FZID35_guide6
  source 1..52: mol_type = other RNA
gactggagttcagacgtgtgctcttccgatctgccggccccattttcttaac

SEQ ID NO: 4061 - RNA, 20 nt, unidentified
  source 1..20: mol_type = other RNA
  misc_feature 1..20: note = FZID35_guide7
ccgtaactctagcacttagc

SEQ ID NO: 4062 - RNA, 53 nt, unidentified
  misc_feature 1..53: note = FZID35_guide7
  source 1..53: mol_type = other RNA
ctttccctacacgacgctcttccgatctggccagttaaatatgctttagcctg

SEQ ID NO: 4063 - RNA, 56 nt, unidentified
  source 1..56: mol_type = other RNA
  misc_feature 1..56: note = FZID35_guide7
gactggagttcagacgtgtgctcttccgatctccgttaatagcactgctctttacc

SEQ ID NO: 4064 - RNA, 20 nt, unidentified
  misc_feature 1..20: note = FZID35_guide8
  source 1..20: mol_type = other RNA
agctcttcaaactctgcaaa

SEQ ID NO: 4065 - RNA, 50 nt, unidentified
  source 1..50: mol_type = other RNA
  misc_feature 1..50: note = FZID35_guide8
ctttccctacacgacgctcttccgatctgctggccatgacaaagcatatg

SEQ ID NO: 4066 - RNA, 59 nt, unidentified
  misc_feature 1..59: note = FZID35_guide8
  source 1..59: mol_type = other RNA
gactggagttcagacgtgtgctcttccgatctctgtctgaatatgccaatacatcaatc

SEQ ID NO: 4067 - RNA, 20 nt, unidentified
  source 1..20: mol_type = other RNA
  misc_feature 1..20: note = FZID88_guide1
agtctcgtgatgtttaagaa

SEQ ID NO: 4068 - RNA, 54 nt, unidentified
  source 1..54: mol_type = other RNA
  misc_feature 1..54: note = FZID88_guide1
ctttccctacacgacgctcttccgatctccacttatattaaacgcgtgcccagc

SEQ ID NO: 4069 - RNA, 58 nt, unidentified
  source 1..58: mol_type = other RNA
  misc_feature 1..58: note = FZID88_guide1
gactggagttcagacgtgtgctcttccgatctaagtcctagaatgagcgcccggtgtc

SEQ ID NO: 4070 - RNA, 20 nt, unidentified
  source 1..20: mol_type = other RNA
  misc_feature 1..20: note = FZID88_guide2
tgcgggtgggtgggggggga

SEQ ID NO: 4071 - RNA, 53 nt, unidentified; identical to SEQ ID NO: 4047
  source 1..53: mol_type = other RNA
  misc_feature 1..53: note = FZID88_guide2

SEQ ID NO: 4072 - RNA, 55 nt, unidentified; identical to SEQ ID NO: 4048
  misc_feature 1..55: note = FZID88_guide2
  source 1..55: mol_type = other RNA

SEQ ID NO: 4073 - RNA, 20 nt, unidentified
  source 1..20: mol_type = other RNA
  misc_feature 1..20: note = FZID88_guide3
agactgaactgaaaaccctc

SEQ ID NO: 4074 - RNA, 48 nt, unidentified
  misc_feature 1..48: note = FZID88_guide3
  source 1..48: mol_type = other RNA
ctttccctacacgacgctcttccgatctctcaggcgttctcccagaag

SEQ ID NO: 4075 - RNA, 53 nt, unidentified
  misc_feature 1..53: note = FZID88_guide3
  source 1..53: mol_type = other RNA
gactggagttcagacgtgtgctcttccgatctctcaggggctcccagtctacc

SEQ ID NO: 4076 - RNA, 20 nt, unidentified
  source 1..20: mol_type = other RNA
  misc_feature 1..20: note = FZID88_guide4
ctgttttccgagcttaatgg

SEQ ID NO: 4077 - RNA, 50 nt, unidentified
  source 1..50: mol_type = other RNA
  misc_feature 1..50: note = FZID88_guide4
ctttccctacacgacgctcttccgatctcaagcaacttccctgaggatcc

SEQ ID NO: 4078 - RNA, 55 nt, unidentified
  misc_feature 1..55: note = FZID88_guide4
  source 1..55: mol_type = other RNA
gactggagttcagacgtgtgctcttccgatctcaagggttttacagggaagaaac

SEQ ID NO: 4079 - RNA, 20 nt, unidentified
  misc_feature 1..20: note = FZID88_guide5
  source 1..20: mol_type = other RNA
gacgaaggtataaacttctc

SEQ ID NO: 4080 - RNA, 48 nt, unidentified
  misc_feature 1..48: note = FZID88_guide5
  source 1..48: mol_type = other RNA
ctttccctacacgacgctcttccgatctgtgcggtggaggttactccc

SEQ ID NO: 4081 - RNA, 59 nt, unidentified
  misc_feature 1..59: note = FZID88_guide5
  source 1..59: mol_type = other RNA
gactggagttcagacgtgtgctcttccgatctgagcattcaggaactcggaggcagatg

SEQ ID NO: 4082 - RNA, 20 nt, unidentified
  source 1..20: mol_type = other RNA
  misc_feature 1..20: note = FZID88_guide6
gtacagtgatttcaccaaac

SEQ ID NO: 4083 - RNA, 49 nt, unidentified
  misc_feature 1..49: note = FZID88_guide6
  source 1..49: mol_type = other RNA
ctttccctacacgacgctcttccgatctggctccagaatctggctgatc

SEQ ID NO: 4084 - RNA, 55 nt, unidentified
  source 1..55: mol_type = other RNA
  misc_feature 1..55: note = FZID88_guide6
gactggagttcagacgtgtgctcttccgatctgccaaggaagactacctggtttg

SEQ ID NO: 4085 - RNA, 20 nt, unidentified
  source 1..20: mol_type = other RNA
  misc_feature 1..20: note = FZID88_guide7
aatgaccagtcaacagggga

SEQ ID NO: 4086 - RNA, 54 nt, unidentified
  source 1..54: mol_type = other RNA
  misc_feature 1..54: note = FZID88_guide7
ctttccctacacgacgctcttccgatctgctatggatattagctagctaacttc

SEQ ID NO: 4087 - RNA, 59 nt, unidentified
  source 1..59: mol_type = other RNA
  misc_feature 1..59: note = FZID88_guide7
gactggagttcagacgtgtgctcttccgatctctcttagtgattgattgaaagcacact

SEQ ID NO: 4088 - RNA, 20 nt, unidentified
  misc_feature 1..20: note = FZID88_guide8
  source 1..20: mol_type = other RNA
gattaaggcaaagacggttg

SEQ ID NO: 4089 - RNA, 51 nt, unidentified
  misc_feature 1..51: note = FZID88_guide8
  source 1..51: mol_type = other RNA
ctttccctacacgacgctcttccgatctggaggagaacgtcctcaacttgg

SEQ ID NO: 4090 - RNA, 59 nt, unidentified
  source 1..59: mol_type = other RNA
  misc_feature 1..59: note = FZID88_guide8
gactggagttcagacgtgtgctcttccgatctctaagagtaactttgtagaatacctgg

SEQ ID NO: 4091 - RNA, 16 nt, unidentified
  misc_feature 1..16: note = ISDra2 TnpB_guide1
  source 1..16: mol_type = other RNA
ctacacccatctgatt

SEQ ID NO: 4092 - RNA, 56 nt, unidentified
  source 1..56: mol_type = other RNA
  misc_feature 1..56: note = ISDra2 TnpB_guide1
ctttccctacacgacgctcttccgatctgttattgtactctgtttccaccccttcc

SEQ ID NO: 4093 - RNA, 60 nt, unidentified
  source 1..60: mol_type = other RNA
  misc_feature 1..60: note = ISDra2 TnpB_guide1
gactggagttcagacgtgtgctcttccgatctcttgggttgatccacttaggaacctcag

SEQ ID NO: 4094 - RNA, 16 nt, unidentified
  misc_feature 1..16: note = ISDra2 TnpB_guide2
  source 1..16: mol_type = other RNA
gccgtggcaaactggt

SEQ ID NO: 4095 - RNA, 55 nt, unidentified
  source 1..55: mol_type = other RNA
  misc_feature 1..55: note = ISDra2 TnpB_guide2
ctttccctacacgacgctcttccgatctggcaatggattggtcatcctggtcatg

SEQ ID NO: 4096 - RNA, 59 nt, unidentified
  misc_feature 1..59: note = ISDra2 TnpB_guide2
  source 1..59: mol_type = other RNA
gactggagttcagacgtgtgctcttccgatctgcttccttggcctctgactgttggtgg

SEQ ID NO: 4097 - RNA, 16 nt, unidentified
  misc_feature 1..16: note = ISDra2 TnpB_guide3
  source 1..16: mol_type = other RNA
tagtcatcttctcccc

SEQ ID NO: 4098 - RNA, 49 nt, unidentified
  misc_feature 1..49: note = ISDra2 TnpB_guide3
  source 1..49: mol_type = other RNA
ctttccctacacgacgctcttccgatctccaaccccttgcccaggccag

SEQ ID NO: 4099 - RNA, 57 nt, unidentified
  source 1..57: mol_type = other RNA
  misc_feature 1..57: note = ISDra2 TnpB_guide3
gactggagttcagacgtgtgctcttccgatctccagtccactgcttcctgtgaggtc

SEQ ID NO: 4100 - RNA, 16 nt, unidentified
  source 1..16: mol_type = other RNA
  misc_feature 1..16: note = ISDra2 TnpB_guide4
atctactcagaaattc

SEQ ID NO: 4101 - RNA, 53 nt, unidentified
  source 1..53: mol_type = other RNA
  misc_feature 1..53: note = ISDra2 TnpB_guide4
ctttccctacacgacgctcttccgatcttgtcttgcagagctgatgcatatcc

SEQ ID NO: 4102 - RNA, 58 nt, unidentified
  misc_feature 1..58: note = ISDra2 TnpB_guide4
  source 1..58: mol_type = other RNA
gactggagttcagacgtgtgctcttccgatcttcagtaatgggccaggtatgttcacc

SEQ ID NO: 4103 - RNA, 16 nt, unidentified
  misc_feature 1..16: note = ISDra2 TnpB_guide5
  source 1..16: mol_type = other RNA
atttgcatgcttctgg

SEQ ID NO: 4104 - RNA, 55 nt, unidentified
  misc_feature 1..55: note = ISDra2 TnpB_guide5
  source 1..55: mol_type = other RNA
ctttccctacacgacgctcttccgatctgttgatttgcctagaaattaatttgcc

SEQ ID NO: 4105 - RNA, 60 nt, unidentified
  source 1..60: mol_type = other RNA
  misc_feature 1..60: note = ISDra2 TnpB_guide5
gactggagttcagacgtgtgctcttccgatctagtaacaaaatactctgcagaaaggagg

SEQ ID NO: 4106 - RNA, 16 nt, unidentified
  misc_feature 1..16: note = ISDra2 TnpB_guide6
  source 1..16: mol_type = other RNA
tcccattctatcctca

SEQ ID NO: 4107 - RNA, 53 nt, unidentified
  misc_feature 1..53: note = ISDra2 TnpB_guide6
  source 1..53: mol_type = other RNA
ctttccctacacgacgctcttccgatctgtgttctctcagggcaggaacagag

SEQ ID NO: 4108 - RNA, 53 nt, unidentified
  source 1..53: mol_type = other RNA
  misc_feature 1..53: note = ISDra2 TnpB_guide6
gactggagttcagacgtgtgctcttccgatcttggtcccccagctgttcccag

SEQ ID NO: 4109 - RNA, 16 nt, unidentified
  source 1..16: mol_type = other RNA
  misc_feature 1..16: note = ISDra2 TnpB_guide7
aaaatttatgtgtcaa

SEQ ID NO: 4110 - RNA, 55 nt, unidentified
  source 1..55: mol_type = other RNA
  misc_feature 1..55: note = ISDra2 TnpB_guide7
ctttccctacacgacgctcttccgatctggaaaaggaccaaccagatcagcagag

SEQ ID NO: 4111 - RNA, 55 nt, unidentified
  misc_feature 1..55: note = ISDra2 TnpB_guide7
  source 1..55: mol_type = other RNA
gactggagttcagacgtgtgctcttccgatctgtaatttggcagccactgggcag

SEQ ID NO: 4112 - RNA, 16 nt, unidentified
  source 1..16: mol_type = other RNA
  misc_feature 1..16: note = ISDra2 TnpB_guide8
ggaatcttactctgtc

SEQ ID NO: 4113 - RNA, 55 nt, unidentified
  misc_feature 1..55: note = ISDra2 TnpB_guide8
  source 1..55: mol_type = other RNA
ctttccctacacgacgctcttccgatcttgtggctttggtctaactactaggcag

SEQ ID NO: 4114 - RNA, 55 nt, unidentified
  misc_feature 1..55: note = ISDra2 TnpB_guide8
  source 1..55: mol_type = other RNA
gactggagttcagacgtgtgctcttccgatctctcagctacttgggaggccgagg

SEQ ID NO: 4115 - RNA, 20 nt, unidentified
  misc_feature 1..20: note = AsCas12a_guide1
  source 1..20: mol_type = other RNA
tctggaggctctcaaggact

SEQ ID NO: 4116 - RNA, 54 nt, unidentified
  misc_feature 1..54: note = AsCas12a_guide1
  source 1..54: mol_type = other RNA
ctttccctacacgacgctcttccgatctatcagatgggtgtagatcaaggcagg

SEQ ID NO: 4117 - RNA, 56 nt, unidentified
  source 1..56: mol_type = other RNA
  misc_feature 1..56: note = AsCas12a_guide1
gactggagttcagacgtgtgctcttccgatctttctgtcactggagattgcgctgc

SEQ ID NO: 4118 - RNA, 20 nt, unidentified
  source 1..20: mol_type = other RNA
  misc_feature 1..20: note = AsCas12a_guide2
ttgaccatgcctatatagtg

SEQ ID NO: 4119 - RNA, 49 nt, unidentified
  source 1..49: mol_type = other RNA
  misc_feature 1..49: note = AsCas12a_guide2
ctttccctacacgacgctcttccgatctccctctccgagcgggcagaag

SEQ ID NO: 4120 - RNA, 53 nt, unidentified
  misc_feature 1..53: note = AsCas12a_guide2
  source 1..53: mol_type = other RNA
gactggagttcagacgtgtgctcttccgatctcagcgcgcacgccttctctgc

SEQ ID NO: 4121 - RNA, 20 nt, unidentified
  misc_feature 1..20: note = AsCas12a_guide3
  source 1..20: mol_type = other RNA
tgtcctcagtggtcccaggc

SEQ ID NO: 4122 - RNA, 51 nt, unidentified
  misc_feature 1..51: note = AsCas12a_guide3
  source 1..51: mol_type = other RNA
ctttccctacacgacgctcttccgatctggagaagccagaggctgttggtg

SEQ ID NO: 4123 - RNA, 56 nt, unidentified
  source 1..56: mol_type = other RNA
  misc_feature 1..56: note = AsCas12a_guide3
gactggagttcagacgtgtgctcttccgatctatattcctgtgccccttccccttc

SEQ ID NO: 4124 - RNA, 20 nt, unidentified
  source 1..20: mol_type = other RNA
  misc_feature 1..20: note = AsCas12a_guide4
tcttgcagagctgatgcata

SEQ ID NO: 4125 - RNA, 51 nt, unidentified; identical to SEQ ID NO: 4017
  source 1..51: mol_type = other RNA
  misc_feature 1..51: note = AsCas12a_guide4

SEQ ID NO: 4126 - RNA, 58 nt, unidentified
  source 1..58: mol_type = other RNA
  misc_feature 1..58: note = AsCas12a_guide4
gactggagttcagacgtgtgctcttccgatcttgctgccatctttatcacactagccc

SEQ ID NO: 4127 - RNA, 20 nt, unidentified
  misc_feature 1..20: note = AsCas12a_guide5
  source 1..20: mol_type = other RNA
tgggattacaggcatgagcc

SEQ ID NO: 4128 - RNA, 54 nt, unidentified
  source 1..54: mol_type = other RNA
  misc_feature 1..54: note = AsCas12a_guide5
ctttccctacacgacgctcttccgatctgtagagacggggtttcaaccacgttg

SEQ ID NO: 4129 - RNA, 58 nt, unidentified
  misc_feature 1..58: note = AsCas12a_guide5
  source 1..58: mol_type = other RNA
gactggagttcagacgtgtgctcttccgatctctcatccatgtaaatcagaggctggc

SEQ ID NO: 4130 - RNA, 20 nt, unidentified
  source 1..20: mol_type = other RNA
  misc_feature 1..20: note = AsCas12a_guide6
tatcaataaattccctttat

SEQ ID NO: 4131 - RNA, 49 nt, unidentified
  misc_feature 1..49: note = AsCas12a_guide6
  source 1..49: mol_type = other RNA
ctttccctacacgacgctcttccgatctctgggcatgtctcagagggcc

SEQ ID NO: 4132 - RNA, 58 nt, unidentified
  misc_feature 1..58: note = AsCas12a_guide6
  source 1..58: mol_type = other RNA
gactggagttcagacgtgtgctcttccgatctggtggcacagatcttaagagttcaac

SEQ ID NO: 4133 - RNA, 20 nt, unidentified
  misc_feature 1..20: note = AsCas12a_guide7
  source 1..20: mol_type = other RNA
aatatatacatgcacatttt

SEQ ID NO: 4134 - RNA, 51 nt, unidentified
  source 1..51: mol_type = other RNA
  misc_feature 1..51: note = AsCas12a_guide7
ctttccctacacgacgctcttccgatctatatcatctggccctcagcaagc

SEQ ID NO: 4135 - RNA, 59 nt, unidentified
  source 1..59: mol_type = other RNA
  misc_feature 1..59: note = AsCas12a_guide7
gactggagttcagacgtgtgctcttccgatcttttctcgagtgtagtctgttagccacc

SEQ ID NO: 4136 - RNA, 20 nt, unidentified
  source 1..20: mol_type = other RNA
  misc_feature 1..20: note = AsCas12a_guide8
agtgagggctttgacctcaa

SEQ ID NO: 4137 - RNA, 54 nt, unidentified
  misc_feature 1..54: note = AsCas12a_guide8
  source 1..54: mol_type = other RNA
ctttccctacacgacgctcttccgatctcgacacactgaattctgccagaaacc

SEQ ID NO: 4138 - RNA, 59 nt, unidentified
  source 1..59: mol_type = other RNA
  misc_feature 1..59: note = AsCas12a_guide8
gactggagttcagacgtgtgctcttccgatctcatacacaagttacaacatgtgctctc

SEQ ID NO: 4139 - RNA, 20 nt, unidentified
  misc_feature 1..20: note = AsCas12f1_guide1
  source 1..20: mol_type = other RNA
aaaagtatcttggggccaaa

SEQ ID NO: 4140 - RNA, 54 nt, unidentified; identical to SEQ ID NO: 4116
  misc_feature 1..54: note = AsCas12f1_guide1
  source 1..54: mol_type = other RNA

SEQ ID NO: 4141 - RNA, 56 nt, unidentified; identical to SEQ ID NO: 4117
  misc_feature 1..56: note = AsCas12f1_guide1
  source 1..56: mol_type = other RNA

SEQ ID NO: 4142 - RNA, 20 nt, unidentified
  source 1..20: mol_type = other RNA
  misc_feature 1..20: note = AsCas12f1_guide2
gagtacgggtacctccaatg

SEQ ID NO: 4143 - RNA, 52 nt, unidentified
  misc_feature 1..52: note = AsCas12f1_guide2
  source 1..52: mol_type = other RNA
ctttccctacacgacgctcttccgatctccagcggttaccatggaggggatc

SEQ ID NO: 4144 - RNA, 56 nt, unidentified
  misc_feature 1..56: note = AsCas12f1_guide2
  source 1..56: mol_type = other RNA
gactggagttcagacgtgtgctcttccgatctctcaagggggagacacatgcagcc

SEQ ID NO: 4145 - RNA, 20 nt, unidentified
  source 1..20: mol_type = other RNA
  misc_feature 1..20: note = AsCas12f1_guide3
tgtcctcagtggtcccaggc

SEQ ID NO: 4146 - RNA, 51 nt, unidentified; identical to SEQ ID NO: 4122
  source 1..51: mol_type = other RNA
  misc_feature 1..51: note = AsCas12f1_guide3

SEQ ID NO: 4147 - RNA, 56 nt, unidentified; identical to SEQ ID NO: 4123
  misc_feature 1..56: note = AsCas12f1_guide3
  source 1..56: mol_type = other RNA

SEQ ID NO: 4148 - RNA, 20 nt, unidentified
  source 1..20: mol_type = other RNA
  misc_feature 1..20: note = AsCas12f1_guide4
tcttgcagagctgatgcata

SEQ ID NO: 4149 - RNA, 51 nt, unidentified; identical to SEQ ID NO: 4017
  misc_feature 1..51: note = AsCas12f1_guide4
  source 1..51: mol_type = other RNA

SEQ ID NO: 4150 - RNA, 58 nt, unidentified; identical to SEQ ID NO: 4126
  misc_feature 1..58: note = AsCas12f1_guide4
  source 1..58: mol_type = other RNA

SEQ ID NO: 4151 - RNA, 20 nt, unidentified
  source 1..20: mol_type = other RNA
  misc_feature 1..20: note = AsCas12f1_guide5
tgggattacaggcatgagcc

SEQ ID NO: 4152 - RNA, 54 nt, unidentified; identical to SEQ ID NO: 4128
  source 1..54: mol_type = other RNA
  misc_feature 1..54: note = AsCas12f1_guide5

SEQ ID NO: 4153 - RNA, 58 nt, unidentified; identical to SEQ ID NO: 4129
  source 1..58: mol_type = other RNA
  misc_feature 1..58: note = AsCas12f1_guide5

SEQ ID NO: 4154 - RNA, 20 nt, unidentified
  misc_feature 1..20: note = AsCas12f1_guide6
  source 1..20: mol_type = other RNA
tatcaataaattccctttat

SEQ ID NO: 4155 - RNA, 49 nt, unidentified; identical to SEQ ID NO: 4131
  source 1..49: mol_type = other RNA
  misc_feature 1..49: note = AsCas12f1_guide6

SEQ ID NO: 4156 - RNA, 58 nt, unidentified; identical to SEQ ID NO: 4132
  source 1..58: mol_type = other RNA
  misc_feature 1..58: note = AsCas12f1_guide6

SEQ ID NO: 4157 - RNA, 20 nt, unidentified
  misc_feature 1..20: note = AsCas12f1_guide7
  source 1..20: mol_type = other RNA
ctgtcattgatcctgcacct

SEQ ID NO: 4158 - RNA, 58 nt, unidentified
  source 1..58: mol_type = other RNA
  misc_feature 1..58: note = AsCas12f1_guide7
ctttccctacacgacgctcttccgatcttcattttatagcgttattaatttgggtgcc

SEQ ID NO: 4159 - RNA, 58 nt, unidentified
  misc_feature 1..58: note = AsCas12f1_guide7
  source 1..58: mol_type = other RNA
gactggagttcagacgtgtgctcttccgatcttctatatcatctggccctcagcaagc

SEQ ID NO: 4160 - RNA, 20 nt, unidentified
  misc_feature 1..20: note = AsCas12f1_guide8
  source 1..20: mol_type = other RNA
agtgagggctttgacctcaa

SEQ ID NO: 4161 - RNA, 54 nt, unidentified; identical to SEQ ID NO: 4137
  source 1..54: mol_type = other RNA
  misc_feature 1..54: note = AsCas12f1_guide8

SEQ ID NO: 4162 - RNA, 59 nt, unidentified; identical to SEQ ID NO: 4138
  source 1..59: mol_type = other RNA
  misc_feature 1..59: note = AsCas12f1_guide8

SEQ ID NO: 4163 - RNA, 87 nt, Spizellomyces punctatus
  source 1..87: mol_type = other RNA
cttatccgagctggttgtcgccggttcaattcctggtgcgggtgctagtgccaatacccatcggctccgcactagatataaacgttt

SEQ ID NO: 4164 - protein, 629 aa, Spizellomyces punctatus; identical to SEQ ID NO: 697

SEQ ID NO: 4165 - RNA, 89 nt, Spizellomyces punctatus; identical to SEQ ID NO: 3844
  source 1..89: mol_type = other RNA

SEQ ID NO: 4166 - protein, 638 aa, Spizellomyces punctatus; identical to SEQ ID NO: 654

SEQ ID NO: 4167 - RNA, 88 nt, Spizellomyces punctatus
  source 1..88: mol_type = other RNA
cttttccgaactggttgtcgccggttcaatccctggtgcgggtgctagtgccaatacccatcggctccgcactatattaagcttgttc

SEQ ID NO: 4168 - protein, 625 aa, Spizellomyces punctatus; identical to SEQ ID NO: 661

SEQ ID NO: 4169 - RNA, 89 nt, Spizellomyces punctatus
  source 1..89: mol_type = other RNA
cttttccgaaccggttatcgccggttcaatccctggtgcgggtgctagtgccaatacccatcggctcccgcactagccaaggtggcacg

SEQ ID NO: 4170 - protein, 628 aa, Spizellomyces punctatus; identical to SEQ ID NO: 729

SEQ ID NO: 4171 - RNA, 89 nt, Spizellomyces punctatus
  source 1..89: mol_type = other RNA
gttttccgaaccggttgtcgcgcggttcaatccctggtgcgggtgctagtgccaatacccaccggctccgcactatcaatataaaggta

SEQ ID NO: 4172 - protein, 627 aa, Spizellomyces punctatus; identical to SEQ ID NO: 705

SEQ ID NO: 4173 - RNA, 141 nt, Torulaspora delbrueckii
  source 1..141: mol_type = other RNA
gtggtggatcttccatttcttctagtttaagtggaggaaatggtcgactcgccatgatgggtcccggacccttcgtacgtaagtacgttgtaagtccctcggagatttaaccgggcgcgacattaagaactcttggcaatc

SEQ ID NO: 4174 - protein, 495 aa, Torulaspora delbrueckii
MTISTQNQAKKRKTSKSKAAKPYWNENAAHFSQQWGLNTMLPTAAKKLGQKINSDSWFSVIKHPQAPIINDSLNLPLSSGVEEELIRARKIRIYPTNSQKETLKKWFGCHRYIYNKALKMHKDGVLMNIKILREKLLNKKTSALTPEEQWLSEYNYDLKDEALRDLVKNYSSNMAKFKKTRVPFKLRFKTKKAPVQTLSVLKKYWNKGKKTFYSDIYSSFSLRGAEPLPEELPRDSRLQRTRNNKYYLIVPMAGGEIARKPPTEKFIFIDPGVRTFLTGYDSSQTVVEIGKDAIVRIEKLKRRRRQLQSKLAKLRKHKKRQNHRKALHRLDEKISHIVQDLHKKSALFLCKSYDSIFLPKLNFHHCTKLNRKSRSSMATLAHCSFHDRLTMKAEQFHDASVHEVEEDYTSKTCSTCGKIKNDLRSNKIYSCLGCFSVFDRDFNAAKNIMLKYICEHLMASGGSSISSSLSGGNGRLAMMGPGPFVRKYVVSPSEI

SEQ ID NO: 4175 - RNA, 164 nt, Naegleria lovaniensis; identical to SEQ ID NO: 3846
  source 1..164: mol_type = other RNA

SEQ ID NO: 4176 - protein, 489 aa, Naegleria lovaniensis
MEPTHPPTNPSLAHGIIPFWDEYSQQVSDKLWACSRDSFHEFNQYNNKGCTDGWFNFSQFTVIESQPVFDVPLNVHHSITENVAFDNSKKPPQLKKAKKGQKTPQKFQADKSMKIRLYPNEQERTTLNQWMGTARWIYNKCLEFTNKSKGVKKNKKNFRTFVVNNDNYQTENQWVVNTPYDVRDAAAIELLTAFNTNFEKKKAGTIDKFMIRFRRKKDRKDHFVLRCKHWKKKSGMYSFIRNIKSAEPLPEELQYDSIIIKNKLNHYYLCIPQVLDIRGENQAPQHSGQVVALDPGVRTFQTTFDLNGYSTKWGSGGAERIGRLCCAYDKLQSKWSQPEVRHCKRYKYKRAGRRIQQKIRNIVDDLHKKLCLWLCRNYQVILLPSFETQKMVKKLHRRINSKTARKMLTWSHYRFKQRLLHKAREHPWTHIYIVNEAYTSKTCSCCGHVYTVGSSEVFRCPSCGSIFDRDINGARNILLRFLTTHRISF

SEQ ID NO: 4177 - RNA, 164 nt, Naegleria lovaniensis
  source 1..164: mol_type = other RNA
gagcaccttgtgtgttgggtcttccccaccttgtgtgcgttgggtcctttcccctggctttcactctttgagtgtttgcttgcaagatcagcactttgttcgatttgtttgttttgttcaaattgttgatttaaataaaggcgttgttgcttgtttcagaattt

SEQ ID NO: 4178 - protein, 495 aa, Naegleria lovaniensis; identical to SEQ ID NO: 640

SEQ ID NO: 4179 - RNA, 164 nt, Naegleria lovaniensis
  source 1..164: mol_type = other RNA
gagcaccttgtgtgttgggtcttccccaccttgtgtgcgttgggtcctttcccctggctttcactctttgagtgtttgcttgcaagatcagcactttgttcgatttgtttgttttgttcaaaatgttgatttaaataaaggcgtattggaacattgaatatata

SEQ ID NO: 4180 - protein, 495 aa, Naegleria lovaniensis; identical to SEQ ID NO: 642

SEQ ID NO: 4181 - RNA, 137 nt, Naegleria lovaniensis
  source 1..137: mol_type = other RNA
gagcaccttgtgtgcgttgggtcctttcccctggctttcactctttgagtgtttgcttgcaagatcagcactttgttcgatttgtttgttttgttcaaattgttgatttaaataaaggcgttaacaattaaatattt

SEQ ID NO: 4182 - protein, 495 aa, Naegleria lovaniensis; identical to SEQ ID NO: 644

SEQ ID NO: 4183 - RNA, 112 nt, unidentified
  source 1..112: mol_type = other RNA; note = Dishui Lake large Algae virus 1
attcatatctgttaaacgacagatacgacccaaatttttatagcgggtatatttttatgggattagacccccatttgaaatgtcactcgctgtaaatatattctttttattt

SEQ ID NO: 4184 - protein, 637 aa, unidentified; identical to SEQ ID NO: 2332
  source 1..637: note = Dishui Lake large Algae virus 1

SEQ ID NO: 4185 - RNA, 71 nt, Parasitella parasitica; identical to SEQ ID NO: 447
  source 1..71: mol_type = other RNA

SEQ ID NO: 4186 - protein, 849 aa, Parasitella parasitica
MEAESDDDFQPPIIRRKRSSRENTQQSGSQKRLKGKDKEIVADDNPILNTTTLDDYDYDDFQPPVVKRPDIGESSSSVNPTFFAAESSTRASHTSNNTPNTPSKRVITIKTTIKGIWKYDYRQPLYDLVHTTNLLVTHTYAFTKYIFLKELATDENFAFNELITKDFFVEVFLSLVSAKAGNSERLKDTTKRYRSLIGKHKDAYFEDAKYTPISLAYAQQIALYECAKVQTAYFNNMKAHFGNRLRALINKLFKKKEKVESLTKEMEANNFSIKEIKQAIRKNVYQPCNQVKLAITKKNMPESGLLDDKSVTQLNEFFSMYAVDYTFQKESIFYDVVANPEKHFKAFYKLAQLSEAYEVKPFACFPLRRTFIPCYMTVDSKILNYHILKNKKVLKMDEKFNAWGRVVNLERKAFKSQGCKKTLHFQGTLETDGVGVSILKQNTDTNRKSVMPKKPLEDIDDETKYIEKLEDAELKQTLGKCVLMDPGRRDLLYCMKETSRADKKEIMIFTKNDRSKCSRHFRRLRKLLQPSQIREAETYLSGFATKSVNMEKFVEYIQARASVKDILYEYYGNETAKSITEFYPESQFDFKVDQKCNLYYENLFVAKIRGFYPQPEHEPNDITLKSHMYHTYLQIMLNQKHISERLNSEKRRKIEDLAKAILEQPHESGHKTTISSLLGKLRLLPFRKMKFSTKLFSDNNDRKLVKNIKKKFGADAVLVLGNWSAPNTKYQDPTRNKGLRRMLKKNGFPLYLIDEFRTSSFCPKCESDLEKFKVIPNPRPHNQEKQPKVLCHGLLRCKNMSCLEQQTSEGNQRLWNRDQAAVLNFRKILNCLRETKQRPPLFSREPSKN

SEQ ID NO: 4187 - RNA, 89 nt, Parasitella parasitica
  source 1..89: mol_type = other RNA
acattccgcttgagttatcgcttaagcaatttaatgcaggtaagcaacatccaacaaacagagcctgtccaaaaactaatttcttttta

SEQ ID NO: 4188 - protein, 786 aa, Parasitella parasitica; identical to SEQ ID NO: 2307

SEQ ID NO: 4189 - RNA, 229 nt, Batrachochytrium salamandrivorans
  source 1..229: mol_type = other RNA; note = Batrachochytrium salamandrivorans strain AMFP14/2
attcggtgagacaaaggaagcagcagaggctgaggctatccgacaggcggagtcggaggccggttcgctatcggatctcacaaccacggcacgtcatgagtcataacttatggcgtgtcaacccacgtcgttatgacgtcgtggggcggtttattatttttgtgtcggcctcaaaatttgagggcacagttgtgtggtgccacgtgaacagctgtttgtcgtctgacga

SEQ ID NO: 4190 - protein, 837 aa, Batrachochytrium salamandrivorans
  source 1..837: note = Batrachochytrium salamandrivorans strain AMFP14/2
MDPPLEGGEDQGISHRVVKHNLARVLRDPDKLEVLCGMVKGGHHIVVHAYQFIKLFILHEYETHIKSAKGGTSTEGGTSTEGGTSAKGGTSTPELTPVTVSFVQCVVTVLCEETGARETKVRTEAKTELKKKLKDFYRLHYKETVSPHQQGLGFNNQAQIVAYLAVQVVTSLVNNIQRRYVQHLDIFLRTLYGGEVLALTEEVRKLDNQLRASKTKEARSKAARKKKAKEEAALRAKLVDERKALVTAKTTRARKIAEARDFVLFDAKKPAAAKAAKTEAAKTEAAAAKAAKTEAAATRKRAKTEAAAAKAAKTEPAVTRKRAKAGGHAVEEPAAKAPVPPPARTMPPELIDHWRWIRPDRPIQQDSVYYDIQAAPLDYLPCMIYMSRFAQAAGQRVLNVFPQRSSLVPAYITVDTTLAIKFLLPDDFMLKGQTKKPTQRQLLDNITRHQDEIWASVVKLEKRCFAPRNSKYEFGWQFTTDGIGCSLLWVSRGTHTASRENKEAGNRHKRGRPGPSTKEEPKTRAEVREAMYSWAAAAGRLVVGVDPGRDDLLFCSREKSDEEKRVEGSREASWHFSAKQRRHETGATRYRKKRAIMSKWPVGEKSVQAWESELSEFSRKAMTTASFKAYCKAKNALNARLYPHYERVAYRKMRWHQYINSQRSDAKMVNDFGAKLGTKEQVVLAYGDWGHGSSHMKYQAPTRRVGMQRLFEKAGYLVVLVDEYLTSRTCYKCDHRCANFKMVPQPRPWMRETRPKVLRHGLLRCKNCSTHWNRDRNGSLNIMRCGIAARDNLDRPPCMDRIKFGETKEAAEAEAIRQAESEAGSLSDLTTTARHES

SEQ ID NO: 4191 - RNA, 153 nt, Guillardia theta; identical to SEQ ID NO: 630
  source 1..153: mol_type = other RNA; note = Guillardia theta CCMP2712

SEQ ID NO: 4192 - protein, 690 aa, Guillardia theta; identical to SEQ ID NO: 628
  source 1..690: note = Guillardia theta CCMP2712

SEQ ID NO: 4193 - RNA, 126 nt, Batillaria attramentaria
  source 1..126: mol_type = other RNA; note = Batillaria attramentaria isolate Wonlab-2016 000051F
tttttccttggcccaaggattgccaaacaccactcaaatcctcgttcaggggcctcgagtggctgggcatatatgggttagcactgagacttcgataagaagcaacgatcttggacaccacgaaat

SEQ ID NO: 4194 - protein, 481 aa, Batillaria attramentaria; identical to SEQ ID NO: 612
  source 1..481: note = Batillaria attramentaria isolate Wonlab-2016 000051F

SEQ ID NO: 4195 - RNA, 112 nt, Mercenaria mercenaria
  source 1..112: mol_type = other RNA; note = Mercenaria mercenaria isolate YKG-2019
tcgggttcgattctatccccagggctcgaatgcatttttgtcacagattttgccaatgcaagatctgggggcaagaatgtctccgggtgaaaagagtcaggctggaaagatt

SEQ ID NO: 4196 - protein, 478 aa, Mercenaria mercenaria; identical to SEQ ID NO: 596
  source 1..478: note = Mercenaria mercenaria isolate YKG-2019

SEQ ID NO: 4197 - RNA, 112 nt, Mercenaria mercenaria
  source 1..112: mol_type = other RNA; note = Mercenaria mercenaria isolate YKG-2019
tttagggctcgattctttgccttctcgatgcatttattgccacagattttgctaatgcagtttctgaggcaagaatgtgttcgggtaaaaagagttaatgggcaaactatga

SEQ ID NO: 4198 - protein, 478 aa, Mercenaria mercenaria; identical to SEQ ID NO: 594
  source 1..478: note = Mercenaria mercenaria isolate YKG-2019

SEQ ID NO: 4199 - RNA, 78 nt, Dreissena polymorpha
  source 1..78: mol_type = other RNA; note = Dreissena polymorpha isolate Duluth1
attaggtcgatccatcctaagttcgaaagttgattgctgggcaattttctgccgaatgatatgggttatgacactacg

SEQ ID NO: 4200 - protein, 479 aa, Dreissena polymorpha; identical to SEQ ID NO: 602
  source 1..479: note = Dreissena polymorpha isolate Duluth1

SEQ ID NO: 4201 - RNA, 95 nt, Dreissena polymorpha
  source 1..95: mol_type = other RNA; note = Dreissena polymorpha isolate Duluth1
aattaggtcgatccatcctaagttcgaaagttgattgctgggcaattttctgccgaatgatatgggttatgacactacgttagtgattgtgtgcc

SEQ ID NO: 4202 - protein, 479 aa, Dreissena polymorpha
  source 1..479: note = Dreissena polymorpha isolate Duluth1
MKRKREDLTLWDAANVHKHKSMWYWWEYIRRKDLINHEKTDCDVIQLLQSASVKKQKTQSDKFLTSFSVGIRPTKHQKQVLNEMLRVSNYTYNWCLWLVNEKGLKPHQFELQKIVCKTNARDVDPQYRMANDDWFFNNKMTRVKGTSCKNFCTSYKSAKALKSKLKRPMPISNIIEGSFGVPNLYIRLLSSKDVCTHETNMQNRYICMMPDNFEKRSNPKERFLKLAKRITNIPPINHDVKIVKRADGMFIMNIPCDPKYTRRNASNDTIEKRVCGIDPGGRTFATVYDPIDCCVFQVGIKEDKQYVISKLHNKIDHAHMHLTKAQNKKQQQAARERIVSLKKTHLKLKTFVEDIHLKLSSHLVKEYHYVALGKINVAPMVKKKHLSKRAKRDLLYWQHYRFRQRLTHRTTNTECIFEVQNEAYTSMTCGVCGKLNKNLEKSETFYCDSCNYNTHRDVNGARNILLKSLNMFPFEKKQQ

SEQ ID NO: 4203 - DNA, 54 bp, synthetic construct
  source 1..54: mol_type = other DNA
  misc_feature 1..54: note = Synthetic
tatttgtaatttgatttcataacctatagatatgcccgggtaccgagctcgaat

SEQ ID NO: 4204 - DNA, 54 bp, synthetic construct; identical to SEQ ID NO: 4203
  misc_feature 1..54: note = Synthetic
  source 1..54: mol_type = other DNA

SEQ ID NO: 4205 - protein, 317 aa, Spizellomyces punctatus
MKSFVVSILLLLLSCPWLCTAANKEEEKATALLKLSHEIHGRIGVPMLYARQAPSGTSNPATVPPSTQQSPTPSSSPTPSQQSPSPDPPITTSDAPAPSRTVSPPPITNAPPSETVVITRTGDNGAPTVIVTVTNRPSGQGNVNTRNPKATTSGVPAPDSEAGDTTKKSSSTSVIIGLSVGGAAIVIAGVGIFVFRKLGLKPSKRFRGRLADLDAPGVSPTPTQPSSPSTSPVPGPQDRDKRFLHDTIHVSQSPSVTPFGAPVSAQPQEAYVPYEYAYAPPYATAAAHSTAGYDAYAPGHGPYAAYQGYDTSSQPRY

SEQ ID NO: 4206 - DNA, 1071 bp, Spizellomyces punctatus
  source 1..1071: mol_type = other DNA
tctcacactgaacttttcacctctttttcattgttgccgtcgtccatcgcccatcgcccaccgttgtcgttgccgtcgtcattggaatcattagtcttatcgcttttgtggactctggagcggatgcagatagaggctctttgagtccatcatgaagtcattcgtcgtttcaatcctcctcctcctcttgtcgtgcccatggttatgcaccgctgccaacaaagaggaggaaaaggcgacggccctcttgaaactctcccacgagatacacgggagaataggggtgcccatgctgtacgcacgtcaggctccctctggaaccagtaaccctgcgacagtcccaccttccactcagcaatcccccactccatcctcctccccgacgccgtcccaacagtctccttcacccgacccgccaatcaccacgtcagacgctccggcaccgtctcgcacagtctccccgcctcccatcaccaatgccccgccttcagagaccgtcgtcattactcgaacaggcgataatggcgctccaaccgttattgtcaccgtgacaaataggcctagtgggcagggaaacgtaaacacacgtaatccaaaggcaacgacctcaggcgtccccgctcctgatagcgaggcaggagacacgacaaaaaagagcagcagcacgtccgtcattattggtttgtcggtcggtggggctgccattgtcattgccggtgttggcatttttgtctttcgcaaattggggcttaaaccctcgaaacgctttcgcggtcgtctggcggatctggacgcacccggggtcagccccacacctacccaaccttcgtccccttccaccagtcccgtgcccggcccccaggaccgcgacaaacgctttcttcacgacacgattcacgtttcccaatcgcccagtgtcacgccctttggcgcccctgtctcggcccagccacaggaagcctatgtaccctatgaatatgcttatgctccgccttatgcaaccgcagccgctcattctacggctgggtacgatgcctatgcgcctggtcacgggccgtacgctgcatatca

SEQ ID NO: 4207 - DNA, 633 bp, Spizellomyces punctatus
  source 1..633: mol_type = other DNA
gttgctggaggtctttacgtggcagctttctaagaagatgtctgaagcccgtgacattgagtggcacagactaatgatcggcacagctttcttatctagcggcacagcgactcttttaatgtgactgtaaaaactatcccctcgtgccggacaaacttcaacattatttgaaaaggtcgcccataggaaacgatccattgctgatcgcatccacgcatccgcttttttttttttttcacagcgttcatcggcgacgggcctgtcgtgcaggcaaaaataaaactgtgtggacagggtcaaataggaacgaacgccgagttttttcgacgcctacggtgcattttgccagtcatcacccccttcaaccgtacactcccggacctcacagacttttgctacgacaccacctttgactgcgctacttgctgacactatggagggaattttggactttgggacggacctggatattggtctgtttgaccgcgtggtaaacacaatgttcctcggtggaccagaggtacgaaaactagagatccgggcgaacgagcatgcctcgacgcacccataggttgatattgtgctcaacctttctttttcttctgtctacttgcagcaagctcaggcgaacat

SEQ ID NO: 4208 - DNA, 1488 bp, Spizellomyces punctatus
  source 1..1488: mol_type = other DNA
gcatcttattcacaatggaatgaggatacgaacaaaaaaggagggaaatgggctatgacacgtcatcgcagccgagatattaaatgccgagatagagaggagccgagagatttggaaatgccgccagaaaaatggacactttttattaacaacgttgattgcatagagtttgtatctgatcctttttttgtgacatgtagtatcgtttctgtgtgtatgtgtgtgtgtgttgcgcgtgtgtatttggagctggatagttttactgataatatactgtcatttttgcacactacttactttttgatcctgattatacaatgtctgatcgtaaactatctacgcattgtcacatttcacttttaagctcacttgttccaaaatggaatctaggatcattaccctggcggacgccatgtaagggtaaacccataaataaaggggatcttcgtgcctcccatgagggtgttttgtttcccattaatccgtcgcatattcttagtactatgtccagccaattttgtgcatcaaatctttggaacgcattgaacatagtgtggaggtgattgaaaatggcactaggacccattattatccggattaatcctgttggtcatatcacataatcagcaccccctctatcactcagattggtgtggcatgcatgtaatgttttttttttaaactgcggtgaggcacatgccaaaggtctataaaaggggggccttttgctgtctctccccttcctcaccagttcctcgactctcaaaccatctgcgcaactctcatcacgacccacatggcaagtctcatcgcaactcggtccaatcatgagaatgcagatgtggtggtgtcgaggacctcgcccacctgactacaaccaactggaaccagcagcaaccactcggaaccaacaaagctgctattatactgccacatatgttgagcttggttggtatgtaccaatggcatcatctcttttcattctgccattctgtctgacatgcagctttagtctccaagccttgtcactgaaaatcccccagcttgtgacgctgcccagtcgattcgctcctggatgcaagagtctggcttcaatgccatcaagagtttattccctggtgtagtagctagtcccagtttctgtcatctctacactattctacacaagtctgagtcgagtcgcgcctggaatggtctttttcaatgagcatcttggtcagaatgtgatgggaaagaactctgcgcgttgggttggtaaaaatgtctgacgacgctcttcattctgcgcaaaagtggatggtaaacatgttttactcgttcttgtgacagcggcaggtgtcgctattcacaccaatagctgaacgattgtggttgtgggggctggcctttataccaatgtagttttcggtcgtcgggattgttcagagttccttgttttttcattgctaatttcccctgtgcctcgaggtgagctggacaggaagttca

SEQ ID NO: 4209 - DNA, 861 bp, Spizellomyces punctatus
  source 1..861: mol_type = other DNA
ccgtacttggatcgaagtccaatgccaatgactccagcgggtggctattccccacttggacctgtggttttctcaccttacggggtggattccgatggtggcaagccttggagcggacccggtggacctagattctcgccatcgtacagtccgcagagtcctgggtacagtccatcgtcacctggttactcgccgacgtcgccaagcttctcgcccaccagtccgagctacagtccgacaagtccgagctacagcccaacgagtccgagttactcaccgaccagtccgagctatagccctacatcgcccagttatagtccgacaagcccgagctactcgccgacgtcacccagctattcgccaactagccccagttacagtccgacaagtcctagttattcgccgactagcccgagttatagtcctacgtcgccgagttactcgccaacgtctccaagctacagccctacaagccctagttactctcctaccagtccaacgtattcgccaacatcgccgcaatacagtccaacgagcccgacgtattccccaacgtcgcccaattacagtcccacttcacctcagtactcgccaacgtctcccatgtactcacctacgagtccgagctacagccccacatcaccgcaatactcgcccacttcaccgcagtattcgccaacctcgcctcaatactctccgacatcacctcaatatagcccgacgtcgccgcaatactcgccgacgtctccacaatattcccccacatccccaacattcagcccaacctctccaggaccggtcgctggcggggggtatgctccagctggtgcaaacccttcaacgggcactggtagcagtaca

SEQ ID NO: 4210 - DNA, 932 bp, Spizellomyces punctatus
  source 1..932: mol_type = other DNA
gaaccacaggaataatctcatcactctgtcgttctatactggaggtaacacgcatccacatcgagagacggaagctagtctacttgctagtcaactccgactattaacccttattataccgatttccccatccgcggggagtatcatctttgaactcatcccattgtcgggctttatatgtctcagcatcaagagcttcatggtcattatcgtcagctatttttgtttctggttctttgctggatatagataaaggaggtatagttagcgaggtagtggaacaagagatatatatactcccttaccctccaccactgagaaagttcccgcgctcgatttccttgtcaatatattcttctactgtcattgtcggcaaattatgaccgggccggaatacttgctgacggagagcttcacgtttggatgtgattacaaacggtcgaaggatctgagcgacaaaaagtcagtgttgggtaaatgtccaaagttgagcagtcacaatgcgcaccttcccatctgaggctaataacggtccttggtggttcatccgtggtgggggggttccttcaatgatcgtggtttgatctcttgaatcgggtcctcgaagtgtcccctttgcttttgccatctccaacaatttgcgctcatcctgaatgagcttaaggttttcagccgttcgttgtataaacaagtcgatagttgttaaaatgatttcgcggtctaattcctcatcgacatcttcatcttcattaggggttgccttggcctgataggaaagctgttcatggagctcctgaatcatgatacgcaaacgtcaagttactcagactcggaacagtagacgagcttggaaagtaccgttagcttttcctttgtggctttctcccgcttatatcgtgcaattttttccattcttttcctttcggggtccg

SEQ ID NO: 4211 - DNA, 1523 bp, Spizellomyces punctatus
  source 1..1523: mol_type = other DNA
tccaagccaaatggcgctgcgtacagccccagtggctcgtcatagacttcaattggaaaggtgtgaggtgaggattccggggttctgtatatatttgtatctgatttgctcaatatgctgtatgatgaacatctgtagcaaaaacatcacatgcggttatgagtttagacgacgatcatcgtgcatatgattctgggatgtaacataggccattgtcggaggtagatgtcgtacttttttacatatgagatgaatgtgttggcctttggacataaggcgaagaaaacgcaaaaaaaaacaagaatatctggcggggtcgtccgggttatgtttagtatgcctatcccattttgcactctctttgcgatatttttgtatttgtacagagtaagaaatatacatggcctgaatgccaacaaccatccatacatagtgtggaggtgattgaaaatggcactaggactcattattatccggattaatccggttaatcatatcgcataatcagaacccccatctatcgctcagattggtgtggcatgctaatgttttttttttaaactgcagtgaggcgcatgccaaaggtctataaaaggggacctgctccctcttccctgtttcctctttatccctcgactcgcaagcatctgtgcaacgctcattgcgacccacacaacctcatcgcgactcggtcaaccatgagaacgccgatgtggtggtgtcgaggacctcgaccgcccgacagcaacagtgatcagaaccagtggcaaccaatcggatccgataacaaaaactactattatgctgccacattagttgagcttggttggtatgtaccaatggcatcatctcttttcatgttattctgtcactaacatgcatgtatagtctccaagtcttgtcactgaacatcctctggcttgtgacgctgcccagtcgattcgctcctggatgcaagagtcgggcttcaatgccatcaagagttccagatcaaggcctagtagggaccgcgtgtggtggtgggcaattatccggttagaaccaaccgttacgtattgcgtgtataattgcctagtagtagcttagttagcttttccgaacctgttgtcgccggtttattccctggtgtagtagctagtgccagttcctgtcacctctacactagcaaagaacacgccgcctgttgatgttggcaccgggagtaaaatgaataactctaaaccagttgatgcctcctccgcgattcgaacgcgggaccttctgcttactaggcagacgctctaaccaactgagccaaggaggcgttgataaaccacaaaccacatgtgattctcgatgaaaaaccagattgaaaaaccaattgaatgtgtaagccacccccattgcatggtccctctataatattcaagtcatgcaccaggtagggctttatcggatgacaaagtatcaacaaatagcgcttgtagttttccttcggataaactttgaagcctaagacgcgtttattaggtgtcgcatcgttg

SEQ ID NO: 4212 - DNA, 986 bp, Spizellomyces punctatus
  source 1..986: mol_type = other DNA
gtgtcccactcctctttggtttctagcaaggcttggtcatcattcttcgcaagggttttcgccaaagaagccggcgaaaatgtcaaaaagggggacgtcatatccagctcgggtatacccaagaacgactgtggtggagaggatgtcgtcgtatctggtaaacctggtaaacctgtcatcggtgacgtgaaataatatattcccatcagtatgaagacaaatactgtccatgttttaacattctgttttaccttcggcagcttcagcagccttgccattcttgtccttattgttgacccagtttaccaatacgtcctggacagtcggccggggatggcgtccagttgcccgtcgaccccgtttgagatgtttctgtaacatgaatccaaaaacgctcttctgtaggtttttttttttatgtcgatgagcctatcacccttgtctcaacccccaagcattcaaaataacgcgcaaggagagacaaagtgctcctgtggactcatgcgcagcaaatctacgctacaacaaaagatgacagcagataactcctttttaatgtgacgatgacgatgacaaacaaggaatacaatggtttacattcaaacacaaaggaacaaaacggaaatgtccaaaagacaaaggtgctgtcaaaagcaacaggacaatgaacgcgctggcgtgaacctcccgaccgccttcctcaaaaaccaaagactgaacacagccaaaaaaaaaaaaaagagataagcggttttgttcattgcgtaagtaggaggttgaactgatttgtccacatacgacatgatatatactcaaagaggaaaaaaaggagaaaggaagcatctgcgcccaaaagccatgccatggatgtcccttcaactccctctccttttcgttggtttttttttttgtgatttggacagactgccgaattgacagcgtttctgcatgctgtgatggttgggattttcccggattatgattat

SEQ ID NO: 4213 - protein, 455 aa, Spizellomyces punctatus
MTDGSFSMESERSASHMRADKRPGVLDPLKMRSTKHRTSYSSASSSSSTTSSVEHHLHESAETDAGGECDFGESMLPSCISPALYPAEHYTSLTTLNRSLTQSVLRFDQLTTSYINLRNQLRNILDSVEEQERQYEAYIEEIGQLRFERKFLREVVELSSFRERKQSNASDKSINSTGANKRWSSPMNTDNGDGWGKNARRWTVGGAHSLGACGAFHSLPTSPRLSITSSTFLPHVDDENRVTVDDLASRKIQREAFAAMLQTIRETFLVGAGFASTIGPFQGLEVDSDETDRSSCRSPCSSPGTPVTLLNPSVPSSPSHIRPTPLPSYPSNEKHVETIHARISHLTNLIGQLAPSVEALRESLEDVIAGPALAYRAWVREAEIEREMLRVECEGLREAREGSKKVVDMRGVSEASVGLISSALESLWVEQGDDDHEEWESESVYWSCDEGDDER

SEQ ID NO: 4214 - DNA, 974 bp, Spizellomyces punctatus
  source 1..974: mol_type = other DNA
acttttttagagccctctcgagcttctcgcaaaccctcacattcgactcgaagcatttcccgttcaatctctgcttcacggacccacgcacgatacgccaatgcggggcctgcaatgacgtcctcaagactttcgcgaagggcttcaacagaaggtgcgagctgtccaataaggtttgtgagatgagatattcgtgcgtgtatggtttctacatgtttttcgttggaagggtacgaagggagtggggtggggcggatgtggcttggtgacgacggaacactagggttgaggagagtgacgggggtgccgggggaagagcaaggggaacgacagctggagcgatccgtctcatcagagtccacttccaagccttgaaatggcccaatggtcgaagcgaatcccgcgcccaccagaaacgtttcacgtatagtttgaagcatggcagcaaaggcttcccgttgaattttccgcgacgctaggtcatctaccgttacgcgattctcgtcgtcaacgtgcgggaggaaggttgaacttgttattgagagacgcgggctagttggcaaactgtggaaagcaccacatgctcctaatgaatgtgcgcctcccaccgtccatcgtcgtgcgttttttccccagccatcaccattatctgtgttcatgggtgagctccatcgcttgtttgccccggtgctgtttatacttttgtccgatgcattcgactgcttacgctccctgaacgaagacagctcaaccacttccctcaaaaacttgcgttcaaagcgcagctgccctatttcttcaatataagcttcatattgtcgttcctgctcttcgacactgtccaggatgttccgcaactggtttcgaaggttgatgtatgatgttgtgagttggtcaaatcggagaacggattgggtaagagagcgatttaatgtggttagcgatgtgtagtgctcagctggatacagcgcagg

SEQ ID NO: 4215 - DNA, 1605 bp, Spizellomyces punctatus
  source 1..1605: mol_type = other DNA
attctgttttggtttgtccaaacattgagttcgtgcgggggcatttccacagcacactcggagatgcttgtagcgcgtacccccttgcaagggctgtccgcgcgttgagggatttcatcagtgcgtggtcaaacgatgatgccactttgttaccattgggactattggagggcggaactctttttcccaaattcctgaattcggagcgatcctccgtacattggaaaggacgatgcatgcaaccaaaacatgattactgagcgagatcagggcgtaaacaacaaaatgacagcatgattcagttgcatttttgttcgcattcaatggcataccgcaggcgacattgaacgacttgtaaatgtcctttgtcaacaattgtcagaaataggtctcgaaaaccgtaaactgggtccacatatgcatgtaatgaatgcatcaatagtgtggagctgacagtaaatggcactagtatccattatcatccggatcaatccggttaattatattgcataatcagaacccccatcgctgaaagcgtcctgctaatgttctccaaactgcggtgtggcatgctaatgtaatgtttttttttcttttcagctggaccccattttgccacactcaaggtctataaaaggggacctgccctctcttccctctttcctctttacccatcctcgactctcaaaccatctgcccaacgctcatcgcgacccattgcaacctcatagcgacccacattgcaacctcattgcgactcggtcaaccatgagcatgcagatgtggtggtgccgaggacctcgaccgcccgacagcaaccgtgatcagaaccagcggcaaccaatcggatccgataacaaaacctactattatgctgccacattagttgagcttggttggtatgtaccaatggcatcatctcttttcatattattctgtcgctgacatgcatttttttgtagtctccaagccttgtcactgaacatcctctggcttgtgacgctgcccagtcgattcgctcctggatgcaagagtctggcttcaatgccatcaagagttccagatcaaggcctagtagggaccgtgtgtggtggtgggcaattatccggttaaaaccaaccgttacgtattgcgtgtataattgcctagtagtagcttagcttttccgaaccagttgtcgctggtttattccctggtgtagtagctagtgccagtttctgtcacctctacactacttatgatcaagtagaaccaatttttatggtaaaacattcgagatgaacgttctgccacctctcgacaccggactatttattttaattgcacgttttgacaagacaatgtgacaatcatagataaaagtaaaaagcgcacatcccctatggagatgcagactatgaaagagataccaaaaacaaaagttacatagaggtggcccccatttgtggggagatttaccgttcatcgtcaccctcatcacacgaccagtacaccgattctgattcccattcttcgtgatcatcatcaccttgctcaacccacaaggactctagcgcagacgaaatcaggccaactgatgcttcactcactcctctcatatccaca

SEQ ID NO: 4216 - DNA, 1941 bp, Spizellomyces punctatus
  source 1..1941: mol_type = other DNA
cctcgctgtccaccaacaccagctggggtaatgcagtatcgttgcaccgttgaaaagactgttccataaggcagggaaggtgtgagggtcgtcacatctacaacgaggacgctgttttggcgagtcattgagattacagctggtctgccctaccgggtaaaaagcaccattacctgtattcgtgttggacgacatgttgatcttcaatggccaccgtcaacatatttccatctgaaaacacaaaaactttagaaaactcgcttcttggaatgttatcctaggatgtgcatacatacacatgggagctttcacatggattttatacgtaaccctcctacgtacccatcgcccatgtcgatcctgcccccatttctcaattttgagatctaaaagtaacaagtcaaaaaaataggttttagtgcatgcatgatggacacgtttatataccacatttacgaaccggtacatcccctccgctcacaaacgctttcgatgacctctgaccctccttcaccaaatattgcacccgccgcctcgttggctccaatccggtaaacggcatcaagtacgcatcgtccggggtgggtttggcaggcacaggtgagggatcgggttgggatggggtcttggtcggatgatatgggaatggtcgggttttgggttatagtttttgtgtttgtctggattttgtcgtctatatttgtgtcccactcctctttggtttctagcaaggcttggtcatcattcttcgcaagggttttcgccaaagaagccggcgaaaatgtcaaaaagggggacgtcatatccagctcgggtatacccaagaacgactgtggtggagaggatgtcgtcgtatctggtaaacctggtaaacctgtcatcggtgacgtgaaataatatattcccatcagtatgaagacaaatactgtccatgttttaacattctgttttaccttcggcagcttcagcagccttgccattcttgtccttattgttgacccagtttaccaatacgtcctggacagtcggccggggatggcgtccagttgcccgtcgaccccgtttgagatgtttctgtaacatgaatccaaaaacgctcttctgtaggtttttttttttatgtcgatgagcctatcacccttgtctcaacccccaagcattcaaaataacgcgcaaggagagacaaagtgctcctgtggactcatgcgcagcaaatctacgctacaacaaaagatgacagcagataactcctttttaatgtgacgatgacgatgacaaacaaggaatacaatggtttacattcaaacacaaaggaacaaaacggaaatgtccaaaagacaaaggtgctgtcaaaagcaacaggacaatgaacgcgctggcgtgaacctcccgaccgccttcctcaaaaaccaaagactgaacacagccaaaaaaaaaaaaaagagataagcggttttgttcattgcgtaagtaggaggttgaactgatttgtccacatacgacatgatatatactcaaagaggaaaaaaaggagaaaggaagcatctgcgcccaaaagccatgccatggatgtcccttcaactccctctccttttcgttggtttttttttttgtgatttggacagactgccgaattgacagcgtttctgcatgctgtgatggttgggattttcccggattatgattatattctgttttggtttgtccaaacattgagttcgtgcgggggcatttccacagcacactcggagatgcttgtagcgcgtacccccttgcaagggctgtccgcgcgttgagggatttcatcagtgcgtggtcaaacgatgatgccactttgttaccattgggactattggagggcggaactctttttcccaaattcctgaattcggagcgatcctccgtacattggaaaggacgatgcatgcaaccaaaacatga

SEQ ID NO: 4217 - protein, 456 aa, Spizellomyces punctatus
MMTDGSFSMESERSASHMRADKRPGVLDPLKMRSTKHRTSYSSASSSSSTTSSVEHHLHESAETDAGGECDFGESMLPSCISPALYPAEHYTSLTTLNRSLTQSVLRFDQLTTSYINLRNQLRNILDSVEEQERQYEAYIEEIGQLRFERKFLREVVELSSFRERKQSNASDKSINSTGANKRWSSPMNTDNGDGWGKNARRWTVGGAHSLGACGAFHSLPTSPRLSITSSTFLPHVDDENRVTVDDLASRKIQREAFAAMLQTIRETFLVGAGFASTIGPFQGLEVDSDETDRSSCRSPCSSPGTPVTLLNPSVPSSPSHIRPTPLPSYPSNEKHVETIHARISHLTNLIGQLAPSVEALRESLEDVIAGPALAYRAWVREAEIEREMLRVECEGLREAREGSKKVVDMRGVSEASVGLISSALESLWVEQGDDDHEEWESESVYWSCDEGDDER

SEQ ID NO: 4218 - DNA, 612 bp, Spizellomyces punctatus
  source 1..612: mol_type = other DNA
tcacggacccacgcacgatacgccaatgcggggcctgcaatgacgtcctcaagactttcgcgaagggcttcaacagaaggtgcgagctgtccaataaggtttgtgagatgagatattcgtgcgtgtatggtttctacatgtttttcgttggaagggtacgaagggagtggggtggggcggatgtggcttggtgacgacggaacactagggttgaggagagtgacgggggtgccgggggaagagcaaggggaacgacagctggagcgatccgtctcatcagagtccacttccaagccttgaaatggcccaatggtcgaagcgaatcccgcgcccaccagaaacgtttcacgtatagtttgaagcatggcagcaaaggcttcccgttgaattttccgcgacgctaggtcatctaccgttacgcgattctcgtcgtcaacgtgcgggaggaaggttgaacttgttattgagagacgcgggctagttggcaaactgtggaaagcaccacatgctcctaatgaatgtgcgcctcccaccgtccatcgtcgtgcgttttttccccagccatcaccattatctgtgttcatgggtgagctccatcgcttgtttgccccg

SEQ ID NO: 4219 - DNA, 1427 bp, Spizellomyces punctatus
  source 1..1427: mol_type = other DNA
ttactgagcgagatcagggcgtaaacaacaaaatgacagcatgattcagttgcatttttgttcgcattcaatggcataccgcaggcgacattgaacgacttgtaaatgtcctttgtcaacaattgtcagaaataggtctcgaaaaccgtaaactgggtccacatatgcatgtaatgaatgcatcaatagtgtggagctgacagtaaatggcactagtatccattatcatccggatcaatccggttaattatattgcataatcagaacccccatcgctgaaagcgtcctgctaatgttctccaaactgcggtgtggcatgctaatgtaatgtttttttttcttttcagctggaccccattttgccacactcaaggtctataaaaggggacctgccctctcttccctctttcctctttacccatcctcgactctcaaaccatctgcccaacgctcatcgcgacccattgcaacctcatagcgacccacattgcaacctcattgcgactcggtcaaccatgagcatgcagatgtggtggtgccgaggacctcgaccgcccgacagcaaccgtgatcagaaccagcggcaaccaatcggatccgataacaaaacctactattatgctgccacattagttgagcttggttggtatgtaccaatggcatcatctcttttcatattattctgtcgctgacatgcatttttttgtagtctccaagccttgtcactgaacatcctctggcttgtgacgctgcccagtcgattcgctcctggatgcaagagtctggcttcaatgccatcaagagttccagatcaaggcctagtagggaccgtgtgtggtggtgggcaattatccggttaaaaccaaccgttacgtattgcgtgtataattgcctagtagtagcttagcttttccgaaccagttgtcgctggtttattccctggtgtagtagctagtgccagtttctgtcacctctacactacttatgatcaagtagaaccaatttttatggtaaaacattcgagatgaacgttctgccacctctcgacaccggactatttattttaattgcacgttttgacaagacaatgtgacaatcatagataaaagtaaaaagcgcacatcccctatggagatgcagactatgaaagagataccaaaaacaaaagttacatagaggtggcccccatttgtggggagatttaccgttcatcgtcaccctcatcacacgaccagtacaccgattctgattcccattcttcgtgatcatcatcaccttgctcaacccacaaggactctagcgcagacgaaatcaggccaactgatgcttcactcactcctctcatatccacaacttttttagagccctctcgagcttctcgcaaaccctcacattcgactcgaagcatttcccgttcaatctctgct

SEQ ID NO: 4220 - DNA, 932 bp, Spizellomyces punctatus
  source 1..932: mol_type = other DNA
tatgcccgaaccgtcttcacgtcgtctgtgggtttttgcaattagttttttctggagcggcattgattgagaggaaatgtctattgacccagatcttgaaaggagtcggccaaatgaatcagtggttcttatattaattacaggcaccttgtttcgctatgcgaactcatgacgaattgagaggacatcatttagcgttatgcttaccatagttatgaggatttcggaggctatgttgcccatgatgatggggaaagtgctgattacattaaggcccatcatgatttagaatgagatgaagagagagacgatagtcctttcacatcaacttacctaaaacatgtccaatcgacctgaatatagaaattttaccttcatcatgcctttgtcttcagtggggtcaatacttgttgacgccccaacactgcatttaccaacccttcgccgcctccaaagcatatatggccctattacctatcccaacaagagattgtctagtcgttcctgagactgcccgccttgtaccgggacatcgctcctcggccagtcgctggcgtaaatagacaatctggttcgctcgagtggcactcaaatgttcatgacccgagatgaggcggtcgtactcttaggataattggcacgccctcggttttggggaatcaccagagtttctctattttgggaaatatccagtttccttgggtctggggactctccaacaacagctgaggcgctctccggtagctcgaagggcctacttgataccgcgaaaatcgataggaacgatccgagtactactgtaattaacatatcttacactgtggttttgaaacgaggagttaactcgacgcagtacaatctttctccatggcacttaaaatcctcatccatcttcgggtgtaactaggccgtttctaaaactgtccaaccat

SEQ ID NO: 4221 - protein, 131 aa, Spizellomyces punctatus
MVDQYHVAKCAEQVVGFRLLVLCIPPLAQRTLTNKLTQAMATRARCPANHRFFHSPSMAQSTQRGYKSASGSCRVSPPSHQAIREGLNIYSKVRAGEHSKASFTGGHSLRSRTAVGLYQYCQFRLWHLGVY

SEQ ID NO: 4222 - DNA, 1194 bp, Spizellomyces punctatus
  source 1..1194: mol_type = other DNA
ccgactttggcacttgggtgtctactgagggagttcggcagcctacgggatcttacggtttgtcttgacctgccaagagtagtccaccgagcgatcaccttcccggtcaataggtgtctcagggtatcgtcggagttcccagcttgggggggaacttgctggggccttgttatgccggaaccgcgcagagtcgtcgatgaatgggcggatgggtactgctctgagtgtattgtgtttgggttgtgccaatagtgacaccaggtatctatcggggtcttcactctgtggggacttgctggggcttgcgtggcacgggaggcaacttgttgcatggtcgcagacggttccatttgggatgcgtttttcgtgtttcaaatgtttgcgtgttttcctcaccctcactttttttagctttctttttgatagattcgaccacgaccacgataacgacacgccgagaacaacgcggtaaagtctggtatacggtctttagtttagagaagatgttatatgctgtaaacaataaaattcctccaactgttctaaaaactatactttatcgcggtatttgatgtatttggttgccacggctttcgctgaatacgtacgatattccatagttttatctcgcttggtctttatctatggctacgatgctgatgtataacatcggttgtgctgtcttgtcctgtcctcccttctgttgtccttaaactgcacaccgtctgagtatctactgcgcgtataacgacgggttaggagccttgctgcgatcagacgacagctgagagtcatttacaagtaacgacatcactcgcggaaaagggacaatcgcttctcaactcgttttgcgcattgcacatccactctgttcccacatttgcattgagtgcctttgacttgcgggtagggtggctggggggagagcattagtgtagcgtcttggccgtgcattctcgagcgagatactcgctgccattctgccttgcttcggtgcctagtgcatgcacctccaccgacagggatgctacgtcctgcacccgtgcttccctctgttaccgcgtttatgtgagttaagggcacgccctatctacataaggcatgaataccactgaaaatgacactgatacgaggagttaactcgacgcactacaattatatattatttaaccatttgcaatgccatcagaaatg

SEQ ID NO: 4223 - DNA, 1605 bp, Spizellomyces punctatus
  source 1..1605: mol_type = other DNA
tttgccgatttcaactggatcacacgaacgtagtcccccaatccaacgccttcaggagtccacttgccctaaacatgctgcgtcttcacgttggaagggggtcttttacatacatatccccctcagccctcaactgttctaaattgttattgttatgagaagactctgcatattctcagcacaagcattggtggtttagtggtataattaccgcctgccacgcggtagacccgagttcgattctcggccaatgcactggcagtccccatcgggtacttttgcgagagagcgctggcattactttttgcatggttgacccagaattacaaacgttcgctcgcaaatgaaacaaacccccgaggagtaaccgcaattctaaaatggctgcagtacatagtgtggaggcgattgaaaatggcactaagacccattattatccggataatccggttaatcatatcgcataatcagcacccccatctattgctcaaagcggtgaggcatgtattgtaatgttttttttttaaactgcggtgaggcgcatgccgaaggtctataaaaggggacctgctccctcttccctgtttcctctttatccctcgactcgcaagcatctgcgcaatgctcattgcgacccacattgcaacctcatagcgacccacacaacctcatcgcgactcggtcaatcatgagaacgctgatgtggtggtgtcgaggacctcgaccgcccgacagtaacagtgatcagaaccagtggcaaccaatcggatccgataacaaaaactactattatgctgccacattagttgagcttggttggtatgtaccaatggcatcatctcttttcatattattctgtcgctgacatgcatttttttgtagtctccaagccttgtcactgaacatcctctggcttgtgacgctgcccagtcgatttgctcctggatgcaagagtctggcttcaatgccatcaagagttccagatcaaggcctagtaggtccggacgcgtgtggtggtgggcaattatccggttagaaccaatcgttacgtattgcgtgtataattgcctattagtagttagttaacttttccgaaccggttgtcgccggtttattccctggtgtagtagctagtgccagtttctgtcacctctacactagctattgatggttgaatggcgatcacaccaagttgatcatgctccttccggcgaattgatgccgatacattgtatgcatggtggaccaatatcatgtggcaaagtgcgcagagcaagtggttggctttcgactgctagtcttgtgcattcctccacttgcgcagcggactttgacgaataagctgacgcaagcaatggctacacgtgctcggtgcccagccaatcatcgatttttccattctcccagtatggcgcagtcaactcaacgcggctataaaagtgcgtctggttcgtgtcgcgtttctcccccatctcaccaagcgatccgcgaaggtctcaacatttactctaaggtgagggcgggagaacatagcaaggcttccttcacagggggacattcgctgcggtcccggacagcagttggactctatcagtattgtcaatt

SEQ ID NO: 4224 - DNA, 709 bp, Spizellomyces punctatus
  source 1..709: mol_type = other DNA
cgtaaacacagaataaatgatttcgagagaatataaaggcgttgcgtagggaaggccatattcccggtgttgaccctatctgcactctgtatagacgaagagacaaaatggtgacgtgagactcggctattcgccagtgttccccacacacaggatgcctgcatgcgcttcacactcgaatccccttccaaacccgtttccattactacccacctcaactctggcttcttcaccaacgcctttgctacctcgtttacagcgctcgtagcagccgcgagatgttcataggcaggcggtgcagagcacccggcattcattcgctccaaaagtggctgccatgccgtgagcagtctagcagaataatcctcgttgtcttcaggagtcgtcgacatgcttgatgccaaaaacacaacgccttatcgtcctaaccaaatgccagcaaactaaagcaagacgagaaggataaaaatgactcaaaatactggaattaaaaaaacagaaacccgtttaaaaacttaaacttctcagcgtcccttccttccttacaaatctcaacttccgaatccgcacccttagtgtcactgtgccactaatgattttgaaatatatccatatatggtgatcatgtcggcttagaagctttcaaatccaattctgcgccatttggctatggggattaggcttttcaccaaactgctcgaggatctga

SEQ ID NO: 4225 - protein, 80 aa, Spizellomyces punctatus
MRTLMWWCRGPRPPDSNSDQNQRQPIGSDNKTYYYAATLVELGCLQVLSLNILWLVTLPSRFAPGCKVWLQCHQEFQIKA

SEQ ID NO: 4226 - protein, 353 aa, Spizellomyces punctatus
MHSFVGRARQTVLRQGSAVTGTVIATRRAQVLLCVNNVAKSTFFHTHFPQRTSATSEESLDIPPGVTPTFHNAYNSLNDALNWSKTTPASLRLLSYNIKTSADAQLFQTALKRWRKARQPQNRTDNALFLDILFKIGAYETILEMLCDRPGYRVLPDFQHISELMAGFRNVAVKGEGSEEEVIAVLDNVYKTFALFLYYSIPPTAEIYSAVITSGVYCGLPEGWRRSEVTAKEQISLGLPFEKEAVYALAHGYILSGDFDGALTILKHLGGADTIGLFFQFHSLASKGDIQGAIQVLEKLAAADQVNVANVVGSAHWKSLNEVVEALLPQLSEVEKKTVLALAENANVKLSSA

SEQ ID NO: 4227 - DNA, 505 bp, Spizellomyces punctatus
  source 1..505: mol_type = other DNA
aacaatgtcgccaaatccacgtttttccacacccatttcccccagcgtacctccgcaacttccgaagaatccctcgatattcctccaggcgtcacacccacctttcacaacgcatacaactccctgaacgatgcactcaactggtcgaaaactactccagcaagcctccgtcttctttcctacaatatcaaaacttccgctgacgctcagctgtttcaaactgcactaaagagatggcgtaaagcgcggcaaccacaaaatcgcacggataatgccttgtttttggacattctattcaaaattggggcgtatgagacgattttggagatgctttgtgatcggcctggatatagggttttacctgatttccagcatatcagcgagctgatggctggcttcaggaatgtggctgtgaaaggagaaggcagtgaggaggaggtgatcgcggtcttggacaatgtgtacaagacttttgccttatttctgtactacagtattcctccga

SEQ ID NO: 4228 - DNA, 1605 bp, Spizellomyces punctatus
  source 1..1605: mol_type = other DNA
cgacaaggcgcatggatgaaaagttgggatttcctgcattgagcaagaagaggaaatgccatgtgcaattgccgttgaatatagaagacggagttagtatctgtggaagcaaaagacgatttgggttttggatgttaggttgccagccggtatccaccatacaccaacgacgagttgaggttttccactttctctgtcaaacgtacatgctggcagtggaactctacatggtttccacctaagcgcaatgcatcgactttttgtagtggaaagctattcatgccccaagaccttgtttggcgtgcctctggatagctttccgatcaccttcgaaatccctgatgcctgcaggattcgtaaatgccagatgaggcgcacaggtctaataaaggcaaccagcgtcccgaatgccatgttgcctgaaattcagaaggatcatgacagtaacccacaggtccaacttggaggactgatgcctgcctcatagtgtggaggtgattgaaaatggcactaagacccattattatccggataatccggttaatcatatcgcataatcagcacccccatctatcgctcgaagcggtgaggcatgctaatgtaatgttctccaaactgcggtgtggcatgaatgtaatgtttttttttctttttcaaactgtgatgaggcgcatgctgaaggtctataaaagggggacttttccctctttcctctttatccatcctcgactcgcaagcatctgcccaacgctcatcgcgacccattgcaacctcatagcgacccacacaacctcatcgcgactcggtcaaccatgagaacgctgatgtggtggtgtcgaggacctcgaccgcccgacagcaacagtgatcagaaccagcggcaaccaatcggatccgataacaaaacctactattatgctgccacattagttgagcttggttggtatgtaccaatggcatcatctcttttcatgttattctgtcactaacatgcatgtatagtctccaagtcttgtcactgaacatcctctggcttgtgacgctgcccagtcgattcgctcctggatgcaaagtctggcttcaatgccatcaagagttccagatcaaggcctagtagggaccgcgtgtggtggtgggcaattatccggttagaacaaccgttacgtattgcgtgtataattgcctattagtagttagttaacttttccgaaccggttgtcgccggtttattccctggtgtagtagctagtgccagtttctgtcacctctccactaaaaaggcctaaataatcgatgctgcatgcatgtgttactcattagatacaaaaaaggcttaatgagaatcacatgatttctatagcaaccagcggaaattgaaaggtgaacagatgcaagaccgtcgccgagcaggtcggcgtttgaccttacaaaactagaaagatgcatagctttgtgggccgggcacgacagacggtgttgcggcaaggctcagcagtgactggaactgtcatagctacaagacgcggtatggattttgctgttgatggttgtttgtttttatagcgttctcaaagacgaaacacagcccaagttcttctttgcgta

SEQ ID NO: 4229 - DNA, 1221 bp, Spizellomyces punctatus
  source 1..1221: mol_type = other DNA
aatcaacttggtatccaaacgcgcggggatgtcaaacgagtaagcctcaaagttctttctcgcgcatcctttttgtcgatacatggttgaggggttgtatttttcgtaagaatcggatatatggcgttcagtttggatgcaggtggccactgttcgtaaagctcagctctttgtgtcgacccgtatttgtgaatgaagtaataatagaaaagaatggtgtgtgtgtgtggggggggggggggaaagtagtagcaatcgttttatatgctttatatgcttttgtaactcctcattctgacgacaaggtgatgggtcttttaggaaaattttccacaccacagacactggtaattcacatgggacaaagttcaaatattcccatttattcgtttccacgaggagcaaagacggccatattgcttgataccaacattacttttcatgctttattcaatggtgtcttgtcgtttgtttcgtgaagcccatttcgtcgataaccatctcttggcatcacgttcataggctccatatgtctctgcaaactctgcattcagccgttcttgcttgagatgcaacgatgtgatgcaatgaagtattgtacccgacaatcaagttgcatgaatgacattgtgtcaggaaaatgatgcatatgcaaaccacaacggtgacagacactctgcattaacgacacgcattgcacgttttcaactcgacactaattgtgattcaaagaccgcatgcatggcgttggaatttgggaattgcagaatttgcttttcatttcttttcttgcctgtatccccactttggaaaatgaagaaagacccttgttcttctttctttctttctcctccacatttctttgcacgtcagaatcgccacgcgggcgtcttgctccacccctattcaggcataccatctttcggatcttctccttcccctttgtagatgactcgagatacatttcaaatccttctcgttgcatcgtctcaataagaaacgcccattttgtaattctccgcatttccttgacttggtatgcttcaccatgttgcagagcgacattggtttcaatctcttttacaagaccatctcgcagcacttggaaagtcaaccctgaatgtattacaggttaagaactgcgtatagattccctaatataagcccttctttgccacctaacggcgagtcattcacataaaacattatggaaatagtagg

SEQ ID NO: 4230 - DNA, 821 bp, Spizellomyces punctatus
  source 1..821: mol_type = other DNA
taataagtcgatacgagttgtagtggtacagtcgtatcgatgtattcactgggcaagctgagcactggttcaatttcaattatacttccataggacataaactgcatcttctgtatttttcaggtcttctaccaagtgcgttgcacgcatgcgttcacactagttaacatatatggctagtatttagtctgcccacccaccgtgcacgtttgcatgcattcgacctgcttgactaattgcctgcccatacgagaatgtgttgtatgctgttcaaaatggagatgaatgattgaaatctgattctttctcgatcgatttgcacgccagaattgctacgagcctccacacagagtttcctttggcttcgccctattcaggcatagttcatcatctttcggttctctgcatctttgatgctttagaattcccacaactcgcatggtgaacgcggtatgccattcatagttttttttttacacttgcactttacttgatgaggataatgctgatgcatatcaagcattcacagtaagaattgcggtgtcgttcctgctgttccgagtaactaattcgcaaatacgagatcatcgcgctgcgatctgatagtagctgagcgtcatgtatcgcaaacgacatcactctagggataaggggaaatcccttctgtctttgttttgcggattgtatatctattttgctcgcacttttgcaacgggtgcgttggcgggaatgcatttatgtagaggattggccatcagcattctcgagccggagataccttttttactctcgtccatagtacttccgtttggatgtttgta

SEQ ID NO: 4231 - DNA, 1523 bp, Spizellomyces punctatus
  source 1..1523: mol_type = other DNA
aaggatcgactttggtgaactgaaaattcagacccgccgatggtgctccaaaggccaccacaaaagttcatattccaccttaggcagcatgctctctgaaagcaagcgtgggagaaaccattattattgcccaattcattcggcaggtcagacacgcgtgtactacgtctccttacataaacatacgatcagggattcgactccacgtgactacacgtatcgaatatccaaagcatattggggtactccccactatggtggactggcgtgatcccacatgaccaaacgcgtcgataaatgattcaacatacatagtgtagaggcgattgaaaatggcactaggacccattattatccggattaatccggttaatcatatcgcataatcagaacccccctctatcgctcagattggtgtggcatgtattgtaatgttttttttttaaactgcggtgaggcgcatgccaaaggtctataaaaggggggccttttccctcttacctctttacccatcctcgactcgaagcatctgtgcaacgctcattgcgacccacattgcaacctcatagcaacccacacaacctcatcgcgactcagtcaaccatgagaacgctgatgtggtggtgtcgaggacctcgaccgcccgacagcaaccgtgatcagaaccagtggcaaccaatcggatccaataacaaaacctactattatgctgccacatttgttgagcttggttggtatgtactgattgcatcattttatttcttgtcatcaggtcatcttctgacctgcagtttttttctctagtctccaagccttgccactgaacatcctccagcttgcgagtctccccaatgttgcgaagactctggcttcaatgccatcaagagttccagatcaaggcctagtagggaccgcatgtggtggtgggcagttatccggttagaaccaaccgttacgtattgcgtgtataattgcctagtagtagcttagttagcttttccgaaccggttgtcgccggtttattccctggtgtagtagctagtgccattttctgtcacctctacactatcataaactagtttaacatgctttaaaaatgtagaaaaacaggcgtggtattttctatgcatcggatcataatttctgcatatgtagtctgtaacatacccagcaatatttgtgaaaatagtctaaaggaaatcggtctaagtgtcggccgtgtccaattaagatttggggggttatacttgatttatggacgcgtctgatcatgtgggagcaagcgggcatgaggagctgtggagcaaatggtggagctgtggagcgccgtttcgttaaacccctcaaaatactgtatccgcaagttcattcccgttcatcatttatcgacgcgtttggtcatgtacccgaacattgcagtgcgggtgtcaaccagatttgatgatatggcctactggaatagttgaatgattgcaaccataatacacctgtgtagttcagtcccgctgcaatgcttgaacgat

SEQ ID NO: 4232 - DNA, 531 bp, Spizellomyces punctatus
  source 1..531: mol_type = other DNA
  variation 15..114: note = n is a, c, g, or t
agccccccccccccnnnnnnnnnnnnnnnnnnnnnnnnnnnnnnnnnnnnnnnnnnnnnnnnnnnnnnnnnnnnnnnnnnnnnnnnnnnnnnnnnnnnnnnnnnnnnnnnnnnncccccccccccccccccccccctatcgtcatgcggtcaacattcctgatacttcttgtaaactaaccgggctgaaccacctaacgatttgtgccttccgattgggacaactcacatgcatgaagcatgaatgttttacttttttttccggttttgctcgaaatctctgcaggcaggttgttatttgacagcctattacttggcgagtcaggcgaacgtccacattgcgcatggcttgaccccttttttctttttgctgagtcggccgacagcatggtaccattggtcataatgtttgtttaatgataatcattctcatgtctaaggcgtgatggaacattgtcatctggtgaggcaggatgaggaacgataccagagtgagcccaccgtgcgtgcaatgcacttgaacaaaagacct

SEQ ID NO: 4233 - protein, 281 aa, Spizellomyces punctatus
MDIAEVRDKVFGYLSYVELKRLATTCRTWKTSSDYAAEKLQCILSFEGRKALTLYLSRTNYNEGGEWKHYIPQTPVKVDWNFLSVHIKFPNGREITGIKFPNGREITGPKFEILRTYPYVSLRMGGEEVGNISVILEDSFRLRWKRWNMHDLTIAAPGKAFYSPELTAVYDECPKDGKTMDVLISPGDNRYINLLASGSMEVMDRLSSYHNLLNLVSHLELMKASDDAIRRRKTQAVEDLMRPNDRLGAAIRRYLQCDVGSAVDVYDTLSKWRTSGLNTMN

SEQ ID NO: 4234 - DNA, 1258 bp, Spizellomyces punctatus
  source 1..1258: mol_type = other DNA
agccgaggttcgggacaaggtatttgggtacctttcttatgtagaactcaagcgcctagctacgacttgcagaacatggaagacctcctctgattacgctgctgaaaaattgcagtgcatcctttcttttgaaggacgcaaagcattgactctgtatctgtcccgcacaaactacaatgagggaggcgaatggaaacattacattccgcaaacccctgtaaaggtagattggaactttttgtcagtgcacatcaagtttcccaatggacgggagatcactggcatcaagtttcccaatgggcgggagatcactggaccgaaattcgagatccttcggacttatccgtatgtcagcctgcgcatgggcggtgaagaagtcggtaacatatctgtcattttggaagacagctttcgcttgcgctggaaaagatggaacatgcacgacctaactatcgcggcccctggtaaagcattctactcgcccgaattgacagctgtttacgacgaatgcccaaaagacggcaagaccatggatgttctcatcagtccgggagacaaccggtacatcaatctcctcgctagtggatcgatggaggtgatggacaggctttccagttaccataatttgttgaatttggtcagccacttggagctcatgaaagcctcggacgatgccattcggcgccggaagacgcaagcagtagaagacctcatgaggcctaatgatcgcttgggtgccgcgatacgtcgatacttgcagtgtgacgttggaagtgcagtagatgtctatgatacgttgtctaaatggaggacttcgggattaaacaccatgaattgaacaaatgcgtgtagtcatggtaacgattaccacatcattgagctgctgttgagttagtggttcagctgtaagtcatggtaacgattaccacggcattgagctgcagttgagttgttctgttgatttgtcaaaaaaacccaagttgctcaaattactagacaagtatcccgacaaaccattggttctccttgagtaggcatccccgtgtcaccacggaatacgtcggatgcaacaaggaattttcaaagtaacccgatactggtcacttgaaactggtctggacgtttgtgcaggagtgaacaaagagtgtcgaaatcaccatcaaccgcgtcgatggtgcgcaaagaaatcttcctcgtttgtggcggatagtaagagcgtctgtagtgagattgtttaccattgatctcgtctatttca

SEQ ID NO: 4235 - DNA, 1444 bp, Spizellomyces punctatus
  source 1..1444: mol_type = other DNA
gaaaaataataacacaaaacgcaaatacagaagatgcggaagttatattccgtggatgcacttctctatatcctatattatgtgtatgccccggtcaaaagtcttttattttcaccacatgtagccaggatttttaaaccactttgagatcaaacatgggaaattgccacatataactgcccaatgtgtacacctacatacttgacttttgttgattatatatagcagagatatagggaaagaaaggcagcgggccagggtatttgcgatgtgtgtatggtggcatcctgattcaacacgctcaccgtcgtgtcagtcctgcatttagtcacgtgagtacttgctgtcaacgagtgcatcatagtgtggaggcgattgaaaatggcactaggacccgttattatccggatgaatccggttaatcatatcgcataatcagaacccccctctatcgctcagattggtgtggcatgtattgtaatgtttttttttaaactgcggtgaggcgcatgccagaggtctatagaaggggggccttttccctctttcctctttacccatccttgactcgaagcatctgtgcagcgctcattgcgacccacattgcaacctcatagcgactcacacaacctcatcgcgactcggccaaccatgagaacgccgatgtggtggtgtcgaggaccttgaccgcccgacagcaaccatgaccagaaccagtggcaaccaatcggatctgataacaaaacctactattatgctgccacattagttgagcttggctggtatgtatcgatggcatttcttgcatttcttgtcattgggtcatcttctgacatgcagtttttttctctagtctccaagccttgtcactgaacatcctccaccttgcgagtctccccaatgttgcgaagactctggcttcaatgccatcaagagttctggatcaaggcctagtagggaccgcatgtggtggtgggcagttatccggttagaaccaaccgttacgtattgcgtgtataattgcgtagtagtagcttagttagcttttccgaaccggttgtcgccggtttattccctggtgtagtagctagtgccattttctgtcacctctacactaagatacaagtactcaagcaaaacaaactcgcatttactcagatcaacaaatgtgtttcatatggaaccgtttcaaattccataatggatgtctaatgtcggaatgttctatctgttcgagaaactgcaccttggagagctagtatgttactcggatgatgatgatgaaattgaaagagctttctctgagattgcttagtttctccacatcgagcggaactttctaatgctacgtcatggcctaaaccagcaggtgcatgcgtggttatggcaaccggtaatttgtatccgctgggtgagcttctaaacctggcgagacaatggacat

SEQ ID NO: 4236 - DNA, 1258 bp, Spizellomyces punctatus
  source 1..1258: mol_type = other DNA
aaaaggacgaggtttaaagcttgtgtatattgtcaaaagatatttatttctccaaattgtagactctcctttaatgatcctcggtactggagcgcgaacctacattcatttttcaactgttgaggaggtgttggatgaaagggaatgcggtgctgcatgcaacttatcgttgacaacatcccagaaggaatatcgtttccttgcttccacatcaactgactacacaatgtaagatttgaaacctttacgctgcaagcaccaaagatcagctgctaacatgtgccattgcagatggattgcggctctacgtgactcttttgctctacgcaactcaaccacaccagtagtcagtaggacctcaactctcagccgctccctttcgcagtccaaaggacatggcgacaatttccgctctcgcaaatttggctttcctgtaagaagccacaccgtggattccatcatgagtgcaggagtacctccttccttgaaaggggaacacgcaaatgacagtgagcaggaaacagaaaatgtaacttcagctccccaggatactgtccaactgcaagagacagtgccagctactggcggattgaagttgagcaaacgaccttctctcgtcggtcgtaagcgtactggagtccgttttgcggaagcaccagactctggaatcaagcatgcccccgttgcataccctccaccgattccacccaaaaatgatgttgcggacgatgggccagtcaactctctcagtcgaaaaataagctcgttccttcgaggcggatcaggtgctgactctcgggaaaaggcaccagcagccatggacgaagtactctcccctcggcctccgagtccagaaagagacagaggcgaccgtccccgccgatctggaactctcccccggctatttacaaaactttccaacagcggtgacgcgccagaggatgacggtcgcggtcgttcttccagccgtccgcacagtgcgcatcctgacacccggccacgcagtcggagtaggagcttaacgcgactattgacattggttccctccgtacgaatgccaaggagtcaaagcctggcttccatgttcagaaagcatgcagacgacgcagtcgtccacgaagaaatccgggtttgatgacttttcgtgctgcgtgatgggtgcagggaggggggtggtgcgtgccttagactatttaaacgaccaatattcatggatggggccatctgttttatgcatgatcggcgtgctggacacgtc

SEQ ID NO: 4237 - protein, 568 aa, Spizellomyces punctatus
MKNPPPMTMSFSLEISLLILLLLALIGASVQYIRLTPLCRNTITSIQHKIHIVQTHHVRYHPVRHAFKYPLFYFRVKLGEDFNVPWWLAGWERGLFAVREGDYLGGGDGRKQGFGLGLKQRVLELLASMGISTSDIGSIELVTTPRVLGYAFNPLSVYFCYSSTTPSNVHAVILEVNNTFGERHVYVCCEKNRVKSAPGYDYSHSIDRSFHVSPFNNRSGNYEAHFKHPDKTLDVLLNIKNYTDASLAGLSKPLWFTARVWGDAYALDARTCAYLLVTYPVTAFLTFPRILRQAWILAYRKRMKIYQRPSPMRVPKDGRGMVWKRLNNFQTFCRRTVFDHFHIQAEGHSTSLIVYEQGRPSYTTLHGGAGSPPIKVHVTSPAFYTTLVLEGDDVGRGLGHSFVRGDWTCTKGDLERFLGMLLSKEGNREGRQPMSAEPRECPKTKKVISPFSYPGFAHMHQPSRPQRLSIRWKLWMGSLSIRLEQSLFILVANFTIDPYSVEERIFAYAMDEQAEKVAHSVEPASDNSESTLIGEIDDGADIQRKELDRFQALATAFRKSVGSAITVN

SEQ ID NO: 4238 - DNA, 531 bp, Spizellomyces punctatus
  source 1..531: mol_type = other DNA
gcaagggtttgggttaggtttgaaacagcgtgtgcttgagttattggcaagtatggtgagtcaaagaaaaggctcaagtatgtttatgagtattttagtaactcctttgatagggaatctcaacctcggatatcgggtctatcgaactagtaacaacaccgcgtgtgttgggctatgcatttaatccccttagcgtttacttttgttattcctccaccaccccgtcaaatgtccacgcagtcatcttggaggtgaacaatacgtttggtgaacgccatgtgtacgtttgctgtgaaaagaaccgtgtgaagagtgcccctgggtaaggaagaggtgccgtaacctctaattatcaaatgtgctcatattctctgtccattggcagatatgattatagtcactcgatagatcgatcctttcatgtctctccttttaataaccgtagtggcaattatgaagcccatttcaagcacccagacaagacactcgacgtcctactcaacatcaaaaattacacggatgcatctttgg

SEQ ID NO: 4239 - DNA, 1444 bp, Spizellomyces punctatus
  source 1..1444: mol_type = other DNA
caattcaatatctagagatggcattctaggaggggtggatttacatcatattgctagtttctcatgtctgtattctacttttttatttcttaatattcgaatacacaagctgtacatttgatgcctttccaggtctactttactagtaacttgcgagagagtcagacttacccaacaaaaccctttattttgacctttgaaattttatgcacaatcaacgcatcatcaagggagaattcgttacttcatgcacgaataatgtatgtgttgcggtgtggaaaagccccaaacataaatcacatttaacagataattcctgcttatgcagatcgtgtaacatagtgttgaggcgattgaaaatggcactaggacccattattatccggattaatccggttaatcatatcgcataatcagaacccccctctatcgctcagattggtgtggcatgtattgtaatgttttttttttttaaactgcggtgaggcgcatgccaaaggtctataaaaggggggccttttccctctttcctctttacccatcctcgactcgaagcatctgcgcaacgctcattgcgacccacacaacctcatcgcgactcggtcaaccatgagaacgccgatgtggtggtgtcgaggacctcgaccgcccgacagcaaccgtgatcagaaccagcagcaaccaatcggatccgataacaaaacctactattatactgccacattagttgagcttggttggtatgtatcgatggcatttcttgcatttcttgtcatcgggtcacctcgctgacatgcagttttttttagtctccaagccttgtcactgaaaatccaccagcttgtgacgctgcccagtcgattcgctcctggatgcaagagtctggcttcaatgccatcaagagttctggatcaaggcttagtagggaccatgtgtggtggtgggcagttatccggttagaacaaccgttacgtattgcgtgtataattgcctagtagtggttagatagcttttccgaaccggttgtcgccggtttattccctggtgtagtagctagtgccagtttctgtcacctctacactaatataagtccttatttaggacccaggaccatgaagaatcctcccccaatgacaatgtcattctcactagagatctcgttgctcattcttcttcttcttgctctcattggtgcttctgtccaatacatacgtctaacgccactgtgcagaaacactatcaccagcatacaacacaagatccacattgtacaaacccatcacgtccgataccatcccgttcggcatgcattcaagtacccacttttctactttcgagtcaaattgggtgaggatttcaatgtaccctggtggttagctgggtgggagagagggctttttgcggtgcgagaaggcgactatctaggcggtggggatggcaggaa

SEQ ID NO: 4240 - DNA, 612 bp, Spizellomyces punctatus
  source 1..612: mol_type = other DNA
ctttattgacaatttcaaagtcgtggacctcaatttcggcccatggaatgtcatcatcgataaattctgcgtactagccttgcttcagtgtacggttacatttatgtatgtttaggtacttacttccatagaaggaaccgctaattgatccagagtatacaatgcttcatctcgatggtggtattcaactggaaccgtaccctccgattcatccacccccttcattttgtcatcctcctctgacgacgccgatgacaatgacgataccgaaacactgtcttcatcagccacaagatgaaccccttcccactccgtatcgctcatgctgtctaccaaatcaatcacctagccagtcattaacaacaggaacctctcgataatgcgttcacaaccttacctccattattgtcatgtacagaaacaagaagaaggtcaaggcagtgataaatgttggaagctttttatacagaaagtaagctactctgtgtaaataaatcacttactgatcatggacgtgtaagcacattccaaccatcagcaccacgtgacattgggcattagaacagttggatatgggaaacgcaccagggtttattaaacaatgcgtatgga

SEQ ID NO: 4241 - protein, 105 aa, Spizellomyces punctatus
MRTPMWWCRGPRPPDSNRDQNQRQPIGSDNKTYYYTATLVELGCLQAFVTENPPACDAAQSIRSWMQESGFNAIKSSGSRPSRDRVWWWAIIRLEQPLRIACIIA

SEQ ID NO: 4242 - DNA, 1343 bp, Spizellomyces punctatus
  source 1..1343: mol_type = other DNA
ggggtcgggatgaagggcacgccggcttggggagtacgggacggacgacaaaaggatatcaacaaacgaactgctgcctttggcaagtcctgtccgctagagggctctgaagccacctacgtccctgttgtacatggatgcaccgtaagagatggagaggtaacacaatggattccgtcccttcgctcttcataacagtccgctccgagctgtaccgtatatttgcgaatccgtcaaatccgtgcatccaggtcccatcgcattggccaattggaatccccgtcgcgttaagatatcgttaatgggtgacgcgagttgcaccgtttcattggcacgatcgtgctccagcaggatgaaatttgggaacatcttgcctgcatccagcgcctgttctaaattgactaaaacttgcgcagagtctgcttctgtatctgtgtagtcatatgtggcatctcttggagagaggttccatagcactgcacggtaatcgagttgggtcaggactgtgcggactcgatcatcaatgtccccaaaaggcgggctgtaacgcgcaaacaaaggattagttgcactgtcggtcaataacgcatattatgtagcgtaccgaaataatctgggccggatatttaaagcttttgtgatggccaattccgtccaaagcagatccgcaatgagcatttcggtggtcatgttggacgctggaaaatgactccaggtatgcgatgcaattgtatgaccctccgcataagctcgctgcaggattctcgggtactgcacgacatgagatcctaaaattcctcacaatcagaacgcgttcccaatacgatcctcaaatgtcacatctcaccaatcacaaagaacgtcgctgtcaggtttttgcttttcagaaaatccagcaactgcgctgtgtattcgcttggtccgtcgtcaaatgtcaacccaatcgtattgttatattgtggggaacaactcgatatgtcggtgccttcattgccatcacgcaaacaatttcggactgtacccgcaacagtttgcttttcactaataacaagattagctcattcattcattatgtcacgaaagcaatgtgttcatcttaccagctccaccagcaactacagccatctgcattagtacatggcttattaacgaatgcattcgacaatggccacccggctgcacagctgaatctccgaatgtctggtttaaccccataaggcgctacaagggacagattgacaagtgctgtccatgacggttttggtggaggcggagtattcaacatgggccagtcagctctgagaacaagagtttataccttgcggtcatcttcattacacaag

SEQ ID NO: 4243 - DNA, 1444 bp, Spizellomyces punctatus
  source 1..1444: mol_type = other DNA
tgctgataatgaaacatgtatctccctctaatcctaagggctgattttctctaggggtatttgttgtataaacgggatcatgggctcgttgtgtgcacatgtaagttcaggtggaagggatgggatacactgttgaagacgcctttggttgggagtttgtggattggtattcgatcattcgagtaggattttgaaaacaggtgacgttgacacttgaaagatcaattgagaaatccgcgaatggatgagttagttaagaatttgctggaacactttcgataattagtgtactttcatagtgaatggacgaactaggataataaagaacctatatcagaaacgactgcgctcatccgagatacatagtgtggaggcgattgaaaagggcactaggacccattattatccggattaatccggttaatcatatcgcataatcagaacccccctctatcgctcagattggtgtggcatgtattgtaatgttttttttttaaactgcggtgaggcgcatgccaaaggtctataaaagggggacctcttccctctttcctctttacccatcctcgactcgaagcatctgcgcaacgctcattgcgacccacacaacctcatcgcgactcggtcaaccatgagaacgccgatgtggtggtgtcgaggacctcgaccgcccgacagcaaccgtgatcagaaccagcggcaaccaattggatccgataacaaaacctactattatactgccacattagttgagcttggttggtatgtatcgatggcatttcttgcatttcttgtcatcgggtcacctcgctgacatgcagtttttttagtctccaagcctttgtcactgaaaatccaccagcttgtgacgctgcccagtcgattcgctcctggatgcaagagtctggcttcaatgccatcaagagttctggatcaaggcctagtagggaccgcgtgtggtggtgggcaattatccggttagaacaaccgttacgtattgcgtgtataattgcctagtagtagcttagttagcttttccgaaccggttgtcgccggttcactccctggtgtagtagctagtgccagtttctgtcacctctacactaatcttgaatgcttagccgatgtggagatccccagggttttcgtgtcctgttcatctggtaatccccgccaactcaatcctgcacattctccgattctcctcgtccggtgtccgacgatattatctccaggtagtttgtactgtatcccgttgcgtgacccttcatacatggctgacgggtaacacggccggcgttggaacaaataaccaaaatttctattcttgattggacgataatacatacacagaattgcattctagttgtggcatctattatacagacatacatcattcaaacttctattaaaatcatggtgggcgcgaaaggtcggggggggg

SEQ ID NO: 4244 - DNA, 863 bp, Spizellomyces punctatus
  source 1..863: mol_type = other DNA
ttttgctgaagttttctgtctcgaataaacgttttctccctctactagtaataaagaaactggctgggttgcgattgccttattgccttggaccatacctgcggagaagtacgcttggaatttgccagagatcatctcgcctcgagatctcggttagagacagttcattgatggcctatttgtgtattgatgtactctgcttttcaagaagttggctatttgaaaacctggcagcttcattcgtccctcatgtattgttgtcaagaagacatgggctgcaggcgcaacggtgcttttatgtgccgaaactgtatagttcctccccaggatcctctcagggaactgatacctcctacgcttgtgcctcgcactcgtaatccttttttttcagcgaaactttcttccaacaaagcttgacaagattccaagcgacattggcatcttgggatacacgcaatgtccccctttgaccacaagtgtcataaccaaacggaccaagttggttcattttcaaggaaacttgatcaacattttacgctgtgatggtcctttcccggagcgtatagtaaatgaagagagctgtcatcaatttcccataagagtgctaaccagagcatccgtagttgctgagagagatcaaaacagctgttgttttacataggcgctgcaacagagctacatcaggacgatcccgcggggatggctatagccagcgattcgcagggaaaccaggtggggttgaatcagcaactttgtaattttgtgaagcaaatctatcatacttcatctaccgatcgaaagtcttatgaattatttccgaatcatttcccaaggaggaccacttttatgcgtccattatactc

SEQ ID NO: 4245 - protein, 278 aa, Spizellomyces punctatus
MLFGSRLLISSSHKMSAPRRHWFRLLVISLITITPAILLCVALSFTYVTTTSAEWAKQAVFSGVIYQGDNMRGPLKNCILLTDPSRLACSGPLCSVASRDSPPFCVQARWAKNFCIAACVLVSLGVLGILVLTVIKLVHLKRDFKHGGRRIRKTHPALAFLAFLVTILNVFSILCLLAALLVGGNAFLNLQPPNGNFATDLVIPDSTVAWLPGKGMTFGLVAWILGVLGISAGTVVFDMPKSQNEWGLLPPKDPHERQIDIIVEEDELEHHRDSIDVA

SEQ ID NO: 4246 - DNA, 612 bp, Spizellomyces punctatus
  source 1..612: mol_type = other DNA
tcattctgagattttggcatatcaaataccacagttcccgccgagatacccaatactccaaggatccaggccaccaacccaaacgtcatcccttttccaggtagccaggctacggttgaatcgggtatcaccagatcggttgcaaagttcccgtttggtggctggagattgagaaaagcgttgccgccgacaagaagggcagccaggaggcataaaatactgaaaacgttgaggattgtaaccaggaaggcgagaaaagccaacgcagggtgagtttttcgaattcgacgaccaccgtgtttgaaatcccgcttcaagtggactaatttgataacagtcaagaccaaaatccctagtacgccgaggctaacaagcacgcaggccgcaatgcagaaattctttgcccatcgtgcctgcacacagaatgggggggaatccctcgacgcgacagagcacaaggggcccgagcaggcaagtcgactcggatccgtcagcagtatacagttttttaaggggccgcgccttgatgagaaaagagaccagcgttaacggaaaacaaggacggagcatacgttctacgcgaataatcccaaccccgcccgcggacgaaat

SEQ ID NO: 4247 - DNA, 1427 bp, Spizellomyces punctatus
  source 1..1427: mol_type = other DNA
cattcaccgcctcgcctactctacttaagacgcactggtttactcttgcagcgcttacacgatacagtgtatcaagctcgcgattgtgaaggcgaccgattatcgtcaatatcatctactaaccacggattcaactttatcaacttgactactgcctggatccaaggcaacctcctcggttgctttcactttgttattataactctcgatgcaataactaatatcctttccgttagcatagtgtggaggcgattgaaaatggcactaggacccattattatccggattaatccggttaatcatatcgcataatcagaacccccctctatcgctcagattggtgtggcatgtattgtaatgttttttttttaaactgcggtgaggcgcatgccaaaggtctataaaagggggaccttttccctctttcctctttacccatcctcgagtcgaagcatctgcgcaacgctcattgcgacccacacaacctcatcgcgactcggtcaaccatgagaacgccgatgtggtggtgtcgaggacctcgaccgcccgacagcaaccgtgatcagaaccagcggcaaccaatcggatccgataacaaaacctactattatactgccacattagttgagcttggttggtatgtatcgatggcatttcttgcatttcttgtcatcgggtcacctcgctgacatgcagtttttttagtctccaagcctttgtcactgaaaatccaccagcttgtgatgctgcccagtcgattcgctcctggatgcaagagtctggcttcaatgccatcaagagttctggatcaaggcctagtagggaccgtgtgtggtggtgggcaattatccggttagaacaaccgttacgtattgcgtgtataattgcctagtagttagttagttagcttttccgagccagtttacgctggttcactccctggtgtagtagctagtgccagtttctgtcacctctacactaagtaaaacttgtcgattactgtgccacttactgtctcccatttatttttactttgatcttacctagcatgagaatattcagaacttgaaaggatcaagtttattgatgctatgtatctcaaactatgggtgacatcgccatcctaccatcgcagccggttcacataattctcagtgcatataactggtaattggcagcagtatgctgtgtcctcccaatactagggtgtctcagaaaccggtgatgggagacggcctgaggtttggaatctacagttttatctcttttctctgaaattattcttatagagacattttatagtgaaaggttgtatttggcggcattatgcaacatcgatgctgtcacgatggtgttctagctcatcttcctcaacgataatgtcaatttgtctttcatgggggtcttttggaggcaacagtccccat

SEQ ID NO: 4248 - DNA, 3059 bp, Spizellomyces punctatus
  source 1..3059: mol_type = other DNA
ctggcacttgtaatatagccgttggcacaatcgaaatgactctgtgtttggcgacccgcgcatgtcacttaggtgcgattgtaaataccataacgtctatcattcgggaagggagatgagatgcctttcatacaaattcgcgtatagctctgccacataactacataccaacagagctgcatgggtggattttcgacatcgctttaataaaaagttttccagtgcgaccgactcggtacgacggctgattagcaaatgactgaagggataagtagcattaatattattcacatatatgttcatttgttacatactgtccgtatcctctagctagtgacagattggatccacacgtaaacccaacttttgggatggaaataggagaataccaaccataactgaggtaaataaaaatccaactcttcctcatcaaattcctccagccgttcacatatatagtgttgtattccaacgctttctggatatctcgatatatacaagagagccaaccgggaattaaagaactcgctttgaaacagccgtaatagcaagctacttgtctgctgcttgccactattactgttagacatgctgtggatgtgagtttcaaggtgcaaaggagggcgagaataggacgaggtgtcgttgctcgcagtttgtaaaccccgctgatcgttgatacagtgacgttgagagctcactgacgagcaatggcaacgcgcgcaaaagaaagctcggtagcccctattgatgcttacgcttgtgccctctaacgtatcccatcgcccgtcagaagggaggaaatccggtggttgaacacagcgttgggtaacttgcgaagcggtccacatcttgccttgtgcacgtgataatgtggcattgttcacataggcctccctacctggactttcggcagaaggtattgtgtaaataatactgcagtgatgacaacaacagcgctgttaataggggtagctctacattgacggataggagaaagctctgcaccgtggtgggtagcctctagttgagctcacaatggggttgaatatatcttatagtgtagaggtgacagaaactggcactagctactacaccagggaataaaccggcgacaaccggttcggaaaagctaactaactaagctactactaggcaattatacacgcaatacgtaacggttggttttaaccggataactgcccaccaccacacgcggtcgccttgatccagaactcttgatggcattgaagccagactcttgcatccaggagcgaatcgactgggcagcgtcacaagctggaggattttcagtgacaaggcttggagactaaaactgcatgtcagaagatgacctgatgacaagaaatgcaagaaatgccatcgatacataccaaccaagctcaactaatgtggcagcataatagtaggttttgttatcggatccgattggttgccactggttctgatcacggttgctgtcgggcggtcgaggtcttcggcaccaccacatctgcatgctcatgggtgaccgagttgcaatgaggttgcaatgtgggtcgcaatgagcatttgtgcagatggagagtcaaggatgggtaaagaggaaagagggaagaggcagcaaaaggcccccttttatagaccttcggcatgcgcctcaccgcagtttaaaaaaaaaacattacatgcatgccacactgcagtttggagaacattagcatgcatccttaccgctttgagcgatagatgggggtgctgattatgcgatatgattaaccagattatccggataataatgggtcttagtgccattttcacccgcgcaaaaggccatatttacatgaaaaaggtttgtgtgaatacacaatgaattgtggtgtgctacgattgtgagagcctgaacaaagaactggagcagtgtattctcttgtcatcagatttagacataggccaactgtccaatttcgcctcgggtatcaacaagtttatattccgttgcagatccacttctatttacaccttttacaaggaaggcacggaacaaaacgtatacaggtgaatgaatatgatgtgtaagactttaacgctcgcaaaccccatggtcttgtccagacaactgcgggcgcactgctggagattaatcaaggaacaaccgtgctcgtcgcacggaaattctccacaggtgtagtgccaccaatggtattaccatcgctcataagagcgagtcctatccggaaagcaggcaaacttggtccatatatacgccggcacacaacactcagtccaacttgtttacgtgtattcctccccgtgtatagggatggtccaacgaccaaatattgcaccgcgagatactgaccagacgatgcgtcgagttattgaacggaacgggttgatctcctccttccatacctgcgcaatccacaccatctgctggtaaagggatagaaattggggtagttgtcaatgtcctcaaggtctcaaaaaactgcgcggcgtcatcggcaaatctcgaacaatagacgtggtccagccgacgaaaccgttcactcacggaccacgtctctactggaaaatccggtaataagcttttcaaaacatctgggctcttggtctcgccgttggaaatctcctctccaggtataggaatcatcgtaatttgctgaccacggacgggtattttgcctccggcagatggagactctacaatggggagtacggcggtctgccttgtagtagaggcatcctttatagctgcagctgcgattagaacctcgcaagtactgccgcggactacctcaccgccccccaccccttccccctgttgattacagggaaaagacatgttttgttcgaccagttgcccagcgtcatccttaacattggtagactggtgagatcttggcactaatttggtcatcgccagtccatcgcttacatcgagggagccgtccaccttttccaccggtatcttcacactagcatttgagcatctccgtttgctgcttcgctcctctccgggctgttcacttgaatcccgctgccgtttatatgaa

SEQ ID NO: 4249 - DNA, 612 bp, Spizellomyces punctatus
  source 1..612: mol_type = other DNA
aagtgcctgtgccgacaaaaagagtgcaaatgacattcattgtcagacatgagacactttacgtcggtcgctggcataggcacaccttatatgtagccgatattgttgatgatgctccacaaaggcgaaaaggtgataccgtcgtttgtcaaaagagtcctcaaaggctgttgttaaatgcggcgctaaacgagcggtgggagtaaatcgcgggaatgggtagaatgcgaggttgattgccaaaacaagttgaaacccgaattctcctagttcctctcttttgtgtgtcttgtatggaaagacccaatgtaccctgccactacacacaccgtacgtagactagtagaacaagagttgccttgcaaagtgatgctgatgatgaagaaaacctcaaaatacgaaatgcagcccaaccaagaaaaaaaaccagccaggccaaaatcaaaaggacgagggcgggaggggggaaaagccgtgtggatttctcctgttgatatggggacaacaacagaaactctattcagaagggagttgtatccataactcaagcaagtgggcgcgaccttctatatatggtaacaatatatacaaactcgacgtgaggcgcagggt

SEQ ID NO: 4250 - DNA, 1194 bp, Spizellomyces punctatus
  source 1..1194: mol_type = other DNA
ggttgaccacatatgtgaggaaaagggctgccaaactctataccttttggtgcgcacagtatgccaattcaaaagacattggcctggcctgcggctactgcgcgcacgtggcaaggtcgcgttcggcttacatacgcgtggcctacttacaagaccgctggatcgtcaagttggcatgtctttgaccgcaacatactgaccagttacccagggccgcatgccgccccgcagcgcatcgttcaacacgaccgaccatactcagggtctcacaccaccccgtagcgcatcttttaccatgctcgaccagcttggtaaaaaaggggaagcgacaatgatggcgattccacgagatgtacgcatcaagtatcccattcgaccggctgccaatgcggcagaaggtgttctcaagactgctgtcatgggagatgacggggcggatgagcgaacgagaagcttccaagtgagttttggttatgtggaaactctagttaatctagacctcctcacctctttgcataacgtagataaaggcaaaactccttgcggcccttacagtcctcatcatatacgtcatgttctggtctcgccttgcattggccatccctcttccaccgtcccaaatcctatcactgttccttccagtcctattgggtggtttggtccgaccattgacaccttacccactgcttgccatgctgctaacgggtctagttctccgcaacctccttcctaattgggttggaaacccaccacatcaaatcgcaaaagcattcttttcttttgctctatcaacggtagtttcaagagctggattggcaatttcattatcgacatttatctctcatgtacgtgccacgctggctgtcggagttctacctgtgattgtcgaagcaggatggttgagcatactttcacatggagtgtttggtttaccctgggaatgggctttcatacttgggacgggcgtcgctagtgtgagccctggtgtcgttgttcccctgctgttgggtcttgtagacgggggtgatgctcgatggaaatcaaataggactgtcaggattctgttggcggcgactggagtggatgttttaattgcgacaaccgcatttggagttgctgttgcggttgtggaaggtgtgctagaggggcgtggcattgggcgatggtgggtcgtgagagggctcttggaggtgg

SEQ ID NO: 4251 - DNA, 1427 bp, Spizellomyces punctatus
  source 1..1427: mol_type = other DNA
caagctgcaaccaaaagaggcgcgtcacggactgtgtgaagaactttatggtaattcagggtgtgtttaccattgccgcctgtaaggttatcggcgaatgattggattgattacgtaagacaactgggatatgactttgcaagctccagttgccattgcagcaaccgaacaagcagagtgcaactgcagcaggatatggggccggcgactcttttttttgcttgcaaagtccactgccccccatctggacagtcaaaacgaatgccatcatttgcggtgagccaataagcaaaagaaagggcggggagcccgagtcacttggacgcgttaagaaggttaaagtttcattgagcaatattcccgctgtgacactgcattatgccacggtattggagaaatattttgacattgaaaaaaaaggatataccctgcctatccccagaacatagtgtggaggcgattgaaaatggcactaggacgcattattatccggattaatccggttaatcatatcgcataatcagaacccccctctatcgctcagattggtgtggcatgtattgtaatgttttttttttaaactgcggtgaggcgcatgccaaaggtctataaaaggggggccttttccctctttcctctttacccatcctcgactcgaagcatctgcgcaacgctcattgcgacccacacaacctcatcgcgactcggtcaaccatgagaacgctgatgtggtggtgtcgaggacctcgaccgcccgacagcaaccgtgatcagaaccagcggcaaccaatcggatccgataacaaagcctactattatactgccacattagttgagcttggttggtatgtattgatggcatttcttgcatttcttgtcatcgggtcacctcgctgacatgcaagttttttttagtctccaagccttgtcactgaaaatccaccagcttgtgacgctgcccagtcgattcgctcctggatgcaagagtctggcttcaatgccatcaagagttctggatcaaggcctagtagggaccacgtgtagtggtgggcagttatccggttagaacaaccgttacgtattgcgtgtataattgcctagtagtagttagttaccttttccgaaccggttgtcgccggtttattccctggtgtagtagctagtgccagtttctgtcacctctacactaaacaatgtacagacggaaaacagaaacaaaaattgtacatgaaaaacgtacatatatgagagatagcatgaacaagcaaccgagtcacggccaagatatggtgccgacgggtaaagataaaatgttggcaacctcacaaaaactacacaagtagtcgatcaaaccaaagtgtggccgcaccctcttgaaaagaatacattgatgcctaaacgcagttgcaaaccatgaaccactggaa

SEQ ID NO: 4252 - DNA, 762 bp, Spizellomyces punctatus
  source 1..762: mol_type = other DNA
agctctcatcagacgcacagagtttctgattcatcctcatcattcaagtttccgttcgacatgcagagtcaacccgcatcggatccatcgtgaacgtcatggtagcgagtaacaaccatactgggttggactcggccatcacatacaaagcatcctccaccatgttaccaacaaattgccatcatgggacaggggcatccgcaccgccgactaccctcagcgcacatcaagcgcaaagtgggtatacctgcacacgaaaatggaagacctttccatgttttgccgctcctcccggctccatgatttcatatatagtcattttttttgctcctcctaatctgaccgattctatacagaatcatagatggagtactgtagtatagtgttgtatcaagtagacaatatgctatggctgtgtacattgtagtataattagagaaattgttattctgttgaatatactggaacatcgagttttccttcaatcaaaccatgctgaatatcttacttcgccagcgatcctggttgattagaatggatgatataaaagtcctccgaagatttcatctggggaattagctcaaatggtagagcgctcgcttagcatgcgagaggcacggggatcgataccccgattctccatccatatctcgtaggcaacacgtttaggcaacacgtttttttgaattctttcatctaaggttgtcactccttgaaatttgttgcgctaccaaccagccagtcgttctttgttcatggctt

SEQ ID NO: 4253 - DNA, 873 bp, Spizellomyces punctatus
  source 1..873: mol_type = other DNA
atgctgcatcagtacttgaaaatcagtaatgcgatttcaatgagatgatcacagaacgacaggccaatgatcagtacatgaataggtttttactgttaccgtagattcatctcatctggtcgcatccattctcttcatcaacaaatatcctgtttcaaagtcgacatcgtatatatttgactcttaactgtgtacatatacaaaaactacagaaagcctccatgatcacggaagaaatagatacaaggaagccatatttcatacagggtgcaggcttttcaacaaaactatatgtgggatatgcagaaaatgatcagatattctcgaccgttcctagacttgtaaccactggctggacgggttgcgccgtcgcttggttggaggggccttgtgcttgaacgggtgttgactgagtgggagcggcttgagttggtgttgactgagcgggagccgcttgagtgggagccgcatgagtgggagccgcatgagtgggagccgcatgagtgggagctgcttgggtgggagccgcttgagtgggagccgcatgagtgggagccgcatgagtgggagccgcatgagtgggagctgcttgggtgggagctgcttgggtgggagcggcttgagtgggagctgcttgagcgggagccgcatgagtggcagccgcatgagtgggagcggcttgggtgggagctgcttgagtgggagccgcatgagtgggagcgggttgcgccgctcgaactggtgctgttactccagaaggtccgggttcagcagcaggaggtaacgggacaggttccggaagttttgacggagcaactggttgtccgacaattggctggtcccgatgcgcatctttcatctcctccgccatca

SEQ ID NO: 4254 - DNA, 1681 bp, Spizellomyces punctatus
  source 1..1681: mol_type = other DNA
tgtgagtgcggaataggcttgtccattggcgcatgtataagaagctgccactgctcgtgtgtaggcgttttgaacagcaatcaccgatcctatgttcgactacgtagatgcttgtgctgtaaactgtcgtttccgaaatgaagacactccctttgcaccatgggttatcaattgtggcattgggctgtgaatggacaagtggttggatcggttcttaggccaaatatttattctgatatgtagccagctcttggtggctattttcagcatgacatacttttgggcggacgacattttcatcatgatcgggtcaggtccgcttgttgctcaggtccaggtcttcctgtaaagattgctgtattaaaaagacgcacaatatagccatataatcgccagaacaaacgagattctgtgtacggtatctgttccataatggataatagccgagttccggccaattcatagtgtggaggcgattgaaaatggcactaggacccattattatccggattaatccggttaatcatatcgcataatcagaacccccctctatcgctcagattggtgtggcatgtattgtaatgtttttttttaaactgcggtgaggcgcatgccaaaggtctataaaaggggggccttttccctctttcctctttacccatcctcgactcgaagcatctgcgcaacgctcattgcgacccacacaacctcattgcgactcggccaaccatgagaacgccgatgtggtggtgtcgaggacctcgaccgcccgacagcaaccgtgatcagaaccagcggcaaccaatcagatccgataacaaaacctactattatactgccacattagttgagcttggttggtatgtatcgatggcatttcttgcatttcttgtcatcgggtcacctcgctgacatgcagttttttttagtctccaagccttgtcactgaaaatccaccagcttgtgacgctgcccagtcgattcgctcctggatgcaagagtctggcttcaatgccatcaagagttctggatcaaggcttagtagggaccatgtgtggtggtgggcagttatccggttagaacaaccattacgtattgcatgtataattgcctagtagtagttagatagcttttccgaaccggttgtcgccggtttattccctggtgtagtagctagtgccagtttctgtcacctctacactatagatgtttgattaacttgcagagaccactagcactggacgcatagtatttacgcaccagctgaatcttatctgcggtacaatttgatctcatactgttgataccaagtcattggatgtattctggagaatgggataccactcatctgagatcatggttgttgaatgttctcgtttgctgctttcccgtaattgacacaccttgttcaaggagtgacaatcgagagctaattgaattgataaaaatgcgcgtttgtttatatttcatcaggggaattagctcaaatggcagagcgctcgcttagcatgcgagaggcacggggatcgataccccgattctccacttcatgacgttcttccaaagagaattttttttgcacggttatatcggacgttctctggagtcgaacctagctggtaggataatatagttgactatcacgaagtacagttgataattcagttgtcattacttacgg

SEQ ID NO: 4255 - DNA, 855 bp, Spizellomyces punctatus
  source 1..855: mol_type = other DNA
tgggacaattgggtaaatctctggctgtggaaggggagatgacctcaaccaaacacaatcaatatttgatatacagtcttgggtgagtctgaccgacagcctgacaacaaaaagtatcaacacttactacaaactactgagcaggagaatgagctggatttgaaatagcagaacatactcaagaagactgttgaacatatcagatcgggcagaattttacacagatatctttatcgatttgttcgttcagatgttgatatttactttcttctctccttcgatacagccaaaggccaaatgaggattgctttcatctcagacttacaagtcatccatcatctgcgttttgcttcaatgagcgaatggacggaataccacatatgattagtcatttgaattcacaccgctgtgttttgtccgtggctcatctagcttgtggcacagcaaacccagattttaaaacactcttcttgctttgggctggtcaaaactccgctccacttgcacctctacttactcaacaatcatgtcggatcgtttcctctcactcacacacctaaggctccgctacccagacggtctaccgatatctgtggttgatgctgtgcaagctgttgataagctgctaaacagcgaatggtttactgatacattcgctgtcaaccgcccaaatagtgagattttggacgctgtaaaagacctaagagtctacatctgcgatacagcaacctacaatgcaggggtcctcgctgccacgcacacattacctgacgttatggtcaccgatgagatgggctggtttgatgcccgacttgatgatgagaccatataccttaatgcggaggtttgtaaaaa

SEQ ID NO: 4256 - protein, 205 aa, Spizellomyces punctatus
MSDRFLSLTHLRLRYPDGLPISVVDAVQAVDKLLNSEWFTDTFAVNRPNSEILDAVKDLRVYICDTATYNAGVLAATHTLPDVMVTDEMGWFDARLDDETIYLNAEYFTPRPYNSRGILPVLAMVTVVHELQHFLHYNFNVPSPIHPIPSMRTKDPVESGHEWEIRNLGGVLGRASFDKTPKTVRFLLHSVEAIENGTRTHYYPD

SEQ ID NO: 4257 - protein, 402 aa, Spizellomyces punctatus
MEPAPAMEVSHDEKDQKSRFHALFRVLPRPVVRKATFIIVALAVANALIWVAAFICYRPYPTAQATLLLAWTLGLRHAVDADHIAAIDNVTRKLSQDDNGRTYPCTVGFWFALGHSTIVIVATVVLAVTARGLSDSGWGITGTIVSATFLFLIAACNIVVLVGIIRNMKRMRNGGNLAHVENDEILKTGGFLGRFFRPVFKFINAPWKMYPLGILFGIGFDTATEITLLGISATQAGTGIPLGLVLFLPALFTAGMTFIDTLDGIVMLATYRYAMVNPALKLYYNFVITLLSVLVAIFVGTIEVLSIIAEKYDMTGGFWDAIRKVDEEFGIVGYVVITTFVVVTLVAIVVYRLGTYSSERILVVPPSLEEGTIVDSDQYSHVGRSAPSAIIEHEELAVAKHR

SEQ ID NO: 4258 - DNA, 748 bp, Spizellomyces punctatus
  source 1..748: mol_type = other DNA
ccaatgtgacgacaacaaatgtggtaatcaccacatagcccacaatgccaaactcctcatcaaccttccggatagcgtcccaaaacccacctgtcatatcgtatttttcggcaatgatcgacaacacttcgattgtaccaacaaaaattgctacaagcactgatagcagtgtgataacaaaattgtagtacagcttgagcgccggattgaccatggcgtagcggtatgtcgcaagctacattgagggtagaactgcgtcagatccatagaagatcatgatacacataacatgttgcggccgctaccattactattccgtccagtgtatcgatgaatgtcattcccgcagtgaatagcgcaggcaagaaaagaaccaaaccgaggggtatccccgtgccagcttgcgttgcacttatgccaaggagagtgatttcagtagccgtgtcgaagccaatgccgctattgcgtccagatttagctgtggtggaagttcccatttttggaattgctctagcagcgcgtacaataaaatacccaacggatacatcttccatggcgctgaggaagcaagtcagagcgatctagatgcgcccgcatgcatactttgggccgcttaccgttaataaacttgaagactggacggaagaaccttcctagaaatccgcccgtcttcaagatctcatcattttccacgtgtgcaaggtttctgcatagcagaacaggtcagcaatgtgctaacgtaggacgc

SEQ ID NO: 4259 - DNA, 1630 bp, Spizellomyces punctatus
  source 1..1630: mol_type = other DNA
gatcaccattaataatgcatatgtatacattctcaacagtatacatagtattttactcccagaccctataattcgaggggtatcctccctgtattggccatggtgactgtcgtgcacgagttgcagcactttttgcactacaattttaacgtgcctagtcccatccatccgatcccttcgatgaggaccaaagatcctgtcgagtcaggacatgagtgggaaatccgtaaccttgggggggtattagggagagcctcttttgacaaaacccccaaaacggtgagatttttgttacatagtgtggaggcgattgaaaatggcactaggacccattattatccggattaatccggttaatcatatcgcataatcagaacccccctctatcgttcagattggtgtggcatgtattgtaatgttttttttttaaactgcggtgaggcgcatgccaaaggtctataaaagggaggccttttccctctttcctctttacccatcctcgactcgaagcatctgtgcaacgctcattgcgacccacacaacctcatcgcgactcggtcaaccatgagaatgccgatgtggtggtgtcgaggacctcgaccgcccgacagcaaccatgatcagaaccagcggcaaccaatcggatccgataacaaaacctactattatactgccacattagttgagcttggttggtatgtattgatggcatttcttgcatttcttgtcatcgggtcacctcgctgacatgcagttttttttagtctccaagccttgtcactgaaaatccaccagcttgtgacgctgcccagtcgattcgctcctggatgcaagagtctggcttcaatgccatcaagagttctggatcaaggcttagtagggaccatgtgtggtggtgggcagttatccggttagaacaaccgttacgtattgcgtgtataattgcctagtagtagttagatagcttttccgaaccggttgtcgccggtttattccctggtgtagtagctagtgccagtttctgtcacctctacactaacaagctagtgataacttttgatgtcctaacttgttgcaaaagatatctttctgggagcgggtcggtttccttacactcccagattgcgagacactgggcccgccggccttagaaagcggagcggtgcggacacatgctgccgtgagcgtttgggtggaattcagccgcaaccattgccgacgccaagagaagtcgtacccgaccgcaagccacgcgcgtaaggtgatgacacaaatatgtgtcaagagaactacgttaggtttgattccctgcttgctcattgaggcagggatacgtaggcagcgagtcctgggactcccaggattcgtccaacctttttactttttttttttttttgtcgtaaagcgttatggatcggttgggacatcgtgacacaatgcagatcccatgtctcatctcatctatgtttcgctacagcgagctcctcatgctctataattgcagatggtgccgaccttccaacatggctatactgatcactatcgacaatcgtgccctcttctagtgaaggggggacgactagaattctctcactagaatacgtacccaagcgatatactacaatagcta

SEQ ID NO: 4260 - DNA, 1258 bp, Spizellomyces punctatus
  source 1..1258: mol_type = other DNA
ctatatgtgagtagtattgcacttctgtaaccgaacgaggatttcagctcacccgccgtagttatggtcatgagtttcttgagggaacatacctctaccacgtcacacgtaaagaccaccgccacaacttttcgccgtatttctaccacatgtacctctcttcccatgaaccggcatctgctgtgttgaacggccccttaatctcaagaatcatttcaatcctctcgtttgccccacagcttggcctagtaacggtagtcggggccgtcctcgcgaaagatgtcgtattcgcaacctttgcgcagacatttgcttttgttatgttgaacaaagtttgtacctctcaggtgtgatggtggatcgactgttcttgtggatcctactccgtgtgctgatcattttcctatgtagtattttatgtggtacctctgttttctacccattattttgcctagcagccgccttgtggcagatcaatggaaactcggtattggactcttgtctctttgggttgcgggtcaggtcggcatatgggtgcagtcgactcaacgcaagagctgattgctcatacacgttttacaggctctctggctatcccaagcatttcgcctggagcacctcgggcacaatacgtttcgggagctctgggcagctagtgctatattctatcttgttaatgccggaatattggcgtgcatgatcaaggcgcatgcatttgaaccgatttttgcgaaagggaatgttcgacaggttttcaacgagcctgttctaagcacttcgggtacggatctcatcacgtcggaagaacccgcatcttcagcgaccagtgcagatctatcacaaccaagaccgcacaccatcacgtactctcatggaggctttctcctagaagaacgattattgggggaaggggcaattgagtttgttgtgaagaaggcaaatccgggttggagtgtcctggacgtggtccttttagccacatgctcaggtattttaattatcgtggtaggttccatggtgctggatagatcgccattcttttttgcttaacctttcaaacagtacctgcttgggggctccctcagccgctggcagttttccctaccatttgctctgatactcgtagtttgggtgttgaccagactgttgagtgtccaccgaggtaatctactatcgccctgccaatgcccacatgctactcataaagtcaagcttatagaatcacttctcatcattcgcactctgggtatacaaattg

SEQ ID NO: 4261 - DNA, 531 bp, Spizellomyces punctatus
  source 1..531: mol_type = other DNA
tcgatttttggtagcgtccattccttcgaatctcacgagcattgagaatccgccaggctcgaggggctgagtgctggaatcactcgggtcgcgtttgctcggatcatgggtgacttttaccacgtctcgatatgctagaaatagtgaatgagcttaattcgtgttcgaaaacatgcccacagcagacgacccaccttctccttgaccgcccatatactccgcctcaatctccaataaatccagccatcgtacaaacttgtacagatgttccgccttatcccgtccgaacggaaggactccttttccaatcggatgtgtgaccatgagcagatccgagcataaaaacaaatgcataacttttgcagtgcggtggtccacaacgtccgcgttgaggactagtttacgtgtgtgtttgatgagggttggaggacaatttttcgtttgttcgaatgcttcgaaaagaccggttgcctcttcttctttgcgtttcttttcgttcacggatgcagcgagttcattcatggcctccca

SEQ ID NO: 4262 - DNA, 1444 bp, Spizellomyces punctatus
  source 1..1444: mol_type = other DNA
agacccgcaatagacttggtcagaccactgcgcgcttcattcctctctccaatatcgcggacctgatcatcaacgaagccatcacactattgactgtgagatattacttagcggttgtggcgaaaggagaggatcagttggcggtggtgtttgaggtactgctagaacctcacagcaaacgtcggttatataaggttgaacagtttctctctactttcagaatttactccctcgactagatattgtgaaaagggtatatagcagaggcagagctgtgctctttacagaataagtacttacaacaggaaaacctggaatacatagtgtggaggtgattgaaaatggcactaggacccattattatccggattaatccggttaatcatatcgcataatcagaacccccctctatcgctcagattggtgtggcatgcatgtaatgttttttttttttaaactgcggtgaggcgcatgccaaaggtctataaaaggggggccttttccctctttcctctttacccatcctcgactcgaagcatctgcacaaacgctcattgcgacccacattgcaacctcatagcggcccacattgcaacctcatcgcgactcggtcaaccatgagaacgccgatgtggtggtgtcgaggacctcgaccgcccgacagcaaccgtgatcagaaccagcggcaaccaatcggatccgataacaaaacctactattatgctgccacattagttgagcttggttggtatgtattgatggcatttcttgcatttcttgtcatcgggtcatcttctgacatgcagtttttttctctagtctccaagccttgtcactgaacatcctccagcttgtgagcctccccaatgttgcgaagactctggcttcaatgccatcaagagttctggatcaaggcctagtagggaccgtgtgtggtggtgggcaattatccggttagaaccaaccattacgtattgcgtgtataattgcctagtagtagctgagttagcttttccgaaccagttgtcgctggtttattccctggtgtagtagctagtgccagtttctgtcacctctacactaagtatttacgcatgttgaaagacttccccattctgttcacatcggaaaacccagcggatcccgtcaggagggctccaaaaattataatgtcaattggagcatgtttctactacataagaacctgactaagactagccctatacgaagattaaggtcctgtaaacaccaaggtcgcctttcaaccaccagcaaccataaaacccttccaaaggcgtaaagcaccagccaaaataatgcggcggattttctcggcaggaggcctcatcccctacatcccctacagaagacttcatgtcccatcttttctcctcgtctcttgattctttttgatctccgactggatcgccattaagaaatcttt

SEQ ID NO: 4263 - DNA, 531 bp, Spizellomyces punctatus
  source 1..531: mol_type = other DNA
atgattccaccttccaaaaaggctggccggaacgaaataccaatggcaaactgacttgcatgtccacgatattgcaaatctgccagaatggattctagacaatattttggcaacaatggcaaaagacaagcaacattttcttgaatcaagtggatggctttcaccgccgaccctgctaaacaaccacgaaattgaaaacaaagtggtcgctctgttgaaaaaaaaaagtgaatggtggcaagactgctttagcctgtccaaaccagatgagaacaatatcgtttgtattgcggcaacagcgccgtataatgcaagttgtgtgtggcggacgacatgttaagaacagtaatcatccattttttagtcaacaacggcggcattctgaaattcatctgtcgttctggcagagattctgagggaaacccgtttctccggcatatttccactcatgtcttttctgatgaaatccagaataattggctaattgcgtgtggaagtgaaaagggtgcgagcgattatttccaatggttt

SEQ ID NO: 4264 - DNA, 1258 bp, Spizellomyces punctatus
  source 1..1258: mol_type = other DNA
gaatgactctagtaccagaatctccccctcagtgttgcctatgcgaccctgacgacgagggagcgccaatatttgtctgtccatccggccccttccaactaggtaaatattgctttgagaaattcaggttcaaaaagcaagtgctcgatattctaccgggctaaaatgagaaaaaatctgtagaacaattggactagagtatcctcgacatgtaaccacttgcgaacaggtttcaaagccatcgagtccagccttactgaatggcagccttgaatccgatccccgggcaaacataaaaaaacagccttactgagcatacaggattcaaagtttgtggtattcgcgattagaaaggagatgaggatacccatcaactacataaaagatggtggaatacatcaaaatcattttgacgaggaaaactggtcatggcctctttgacctcttcgatgttctagaagtacgtagtgtgagattgtggaccatgtttggcactcttcaggacactctcattagtctggactgggttgtcgaaggtgatgacgccaagtggtcatgttgtgccatattgatggcattcatattggaaagaccagcacatgcaacaagccataattgtcagatataataataaattcgggaaatcctcttggagaacccgatctaggtaaataatttcgctagttgaatttgttttgggaggaaatctcacagactatattatcaaaggcagatatccttctttcgatgctgctatcaagctcatagtctggatgccctctatgtgcaggatttactagatatcctagtcgcttcttgctgtagacgccgatgaacaggcaccaaccgaaccataacccaaaatccccttccatctgttgacgtcggtatattgggcaccacaaaactagccattatttccctatggattttgcatattctactgaactgaacaaatggacaaatcacaaattaattaaaaaaggtccacacatttcgtcgatataaagcctcctttacgcctagatgccattgtgtcgcaccttgccgtcctcaatgtggatcaagagatgcttccgtcgtctatcatcagtgatgaccacagaacctttattgctcctgatatgatggaacgagtatacatgaaagtaactggattttcccaaaaagatcccgccaagctactagtaataggtggggggatggcccttgtaaatatgacgaaacctgtttctgttccagccgtcctttgatgcct

SEQ ID NO: 4265 - DNA, 1444 bp, Spizellomyces punctatus
  source 1..1444: mol_type = other DNA
gtatcctgactatgtgaaatacgatttgatgttggttacgatgaaaacaacttggcgtgttgaaacaaaggtagaggagaccgcctgcgggaattacgttttgcaacatcctgcggaaacatattgcagtcaatcgcaaagcaattgaagcatgccttgagtcctctttaaaagaatatgtctttgagactttcacaatttgggaataccaaaacataagataggaataacttgtcaagatcgacatgtatccttacttttatgattcgcttggcagctcaaccgatttatacctcgagagactaactacttcacaacgcgtaggaacagaacatggagctgcattcaagtacaacctacatagtgtggaggcgattgaaaagggcactaggacccattattatccggattaatccggttaatcatatcgcataatcagaacccccctctatcgctcagattggtgtggcatgtattgtaatgtttttttttaaactgcggtgaggcgcatgccaaaggtctataaaaggggagccttttccctctttcctctttacccatcctcgactcgaagcatctgcgcaacgctcattgcgacccacattgcaacctcatagcgacccacattgcaacctcatagcgacccacacaacctcatcgcgactcggtcaaccatgagaacgccgatgtggtggtgtcgaggacctcgaccgcccgacagcaaccgtgatcagaaccagcggcaaccaatcggatccgataacaaaacctactattatactgccacattagttgagcttggttggtatgtatcgatggcatttcttggatttcttgtcatcgggtcacctcgctgacatgcagttttttttagtctccaagccttgtcactgaaaatccaccagcttgtgacgctgcccagtcgattcgctcctggttgcaagagtctggcttcaatgccatcaagagttctggatcaaggcctagtagggaccgcgtgtggtggtgggcagttatccggttagaacaaccgttacgtattgcgtgtataattgcctagtagtagttagttaggttttccgaaccggttgtcgcgcggtttattccctggtgtagtagctagtgccagtttctgtcacctctacactaagaaaactataccaagagctagtttcaatttcatcacccaatatgcagatggcgggcgagagttgaataaaagaattcaagacatgtgggtacaaataccccatcaatcgttaactttcaatagcagtaacgtcagttctgagtgactacattacattgactttcaaagcagtatgttccctttctaatctaaaatccatcctggtcgtattgaacgtcgttcgcaccctaatcagttgcatcagcaacccacaacttttcgttgtcaaacctcgcatgtctagaatcatgtcta

SEQ ID NO: 4266 - DNA, 1161 bp, Spizellomyces punctatus
  source 1..1161: mol_type = other DNA
ttcgaattagagatgttgatcactctagtatgatccagtgcactattagaattccataatgacatcggtgacagcagcactgacaggaacaaccatggaaaatcgggagtgacaaggcagtttccttgtcgggtgagatgcacaaggggatgctaggctctgcaatagttgacatgctgtgttagaattgaacaaacgtgcgcagcttgacgcgttggacgcgtttggtcatcaccctttccaacttgtgttatccatatctcctttcatacccgccatctttgacttttgtgtcttattctccaacgttaatatcgtacttgtatgaaagtttaccacaacaaatggctgaccgcataacattagcatacacaagcctcttcatcgctctggtaagatacaatgtcttcctcaacgccctgctgtcgagaattgacagacttgcttgcggattgtgatataaatgaacaggtctttctgacattttctattctcggcggtctaacggtgccgtttctccggtaggttagaggtcccacaatcgcaaggttcaagcacaatccactaatgtcacagttttttacctagttcgatgccctgggctaaatccgctgatgcactggtagccatctggggttactgtccccgaatttcagaagacgtgcccagtccagcgagattctgccatcctctgcaacgaccgtgcgcggcagatgaacatcaattggcgggtaaacttgagctcgaatacttgtgatgttcaactcgacagtgtcttggcaagcaaggtcacatcttaacaccaaatttcattacagaggaccgctcaacgatgctcgcccaattactgatgcatatctttgcatggtttttcacatgtctcgcactagtctgtgcaattcttaagcgaccatttcgagttccggccaatctgagttttctggcctctgtacttgcaatgtaggttcatgctgctattctgctcgcaatcatgcatttcaccaccgttattcacagaattggcctcgcaattggagcttcattcactgtcaccaccatcgagaggatttccaacgcaggagatcctaccgcccgatacggtgcggcggttttcctaagtggctttgccgttttatttctattgatcggatccgctatgta

SEQ ID NO: 4267 - protein, 433 aa, Spizellomyces punctatus
MAPSDDFDLFTHVPIGLVTLWTNWMNGLTSTLSAYTNVPASATFFHSSLTAMSRIASTYLPESMVSTLSSLPHLETSELCMIFVPVACYWIYSTLLYVLSWLQITSVELHRIPTDQKMRPPNRITVRHVIQKVAIQHIIQCIVAYALAVGTRPADMATRPIEHPLLLVAKICVAAVLLDSYQYWMHRWMHTNRFLYRHFHSVHHELTVLYAYGALYNHPLEGFIMDTVGSGVPSLILDMHPWTSTIFFSLATLKTVDDHCGYALPWDPFQRFFRNNAVYHDIHHWGKGRMYNFSQPFFTFWDVWMGTDYEIEMKKKARAKALATPETSTSPRAIKTSTSVKLSVSANAPKRVTVSKPQLSSGLRGDSGQSVHPPSPSNSSSDWSIADSALGSSCEESDASSGASAGMESDADEGVCVRVRFAPDRRREGVCGR

SEQ ID NO: 4268 - DNA, 1105 bp, Spizellomyces punctatus
  source 1..1105: mol_type = other DNA
gcatcagattcctcgcaactacttccaagtgcggaatccgcgatcgaccagtctgacgacgagttcgatggactaggagggtggacagactggccactgtccccacgtaaacccgaagatagttgaggtttactgactgtaacccgtttaggtgcatttgctgacactgagagtttcacggacgttgacgtctttatcgcccgaggggatgtggacgtctcaggggtggctagagcttttgcccgcgccttcttcttcatttcaatctcgtagtccgtacccatccagacatcccagaatgtgaagaaaggctagtagcgccaaaatcatcatcagcacaacattcacatcattttgcctggctatgaagtctgcctagtatagccggcattacaacactcacctggctgaaattgtacattctacccttcccccaatgatgaatatcgtgataaactgcattgttccgaaagaatctctgaaagggatcccacggcaaggcatagccacagtgatcatccacagtcttcagcgtggccagcgaaaagaagattgtgctggtccacggatgcatatcgaggatgagagaaggtaccccacttccaacagtatccatgatgaatccttcaagcgggtgattgtagagtgctccataagcgtaaaggaccgttaactcatgatgaacggaatggaagtggcgatacaggaagcgatttgtatgcatccagcggtgcatccaatactacggaaacgaaaacactttggtttagaaacgaatccggagctgagcgcaattgtgttatgtcattggtcataaacctacctggtaactgtccaacagcacggccgcgacacatatctttgccacaagcaacaatgggtgctctattggccttgtggccatgtctgcaggtcttgttcccactgccagtgcatacgctacaatacattgaatgatgtgttgaatagccactttttgaattacgtgtctcacagtgattcgattgggtgggcgcatcttttgatccgttggaatacggtggagttcaacggaggtgatttggagccatgagagaacgtaaaggagcgtggagtagatccaata

SEQ ID NO: 4269 - DNA, 1630 bp, Spizellomyces punctatus
  source 1..1630: mol_type = other DNA
cctctgcgaattccaatttgcaaagaaggtggtacatgaaaaaatagtcgtcaaaaaatgaattgtggggaaggagcagtagcgggatgtctttcagacacttgaagacaatagtggatgggcgtgcgtgtgtcatgcggaactagtaatgggaccttgtcaatttcctggctctatcgttggaaagtggaaattaggcggtgtttggtgccgaaggacagcggaaatgtagcagtacaagactgtaaagaccttattttagtaattgctcgagtatttcaagcttttgctttttctttggcggcatgatgatatctgtatctgtgggggaaaaagatgaaagcctgggaaaatgggcacgacaacttatataggatcttttggatcaaatcatagttcatgagtctaaatcgagtaaaattatgattaaattggttggaatctatgtactagtgccaatacccattggctcattcatagtgtgaaggcgattgaaaatggcactaggactcattattatccggattaatccggttaatcatatcgcataatcagaacccccctctatcgctcagattggtgtggcatgcagcggtgtggcatgcatgtaatgttttttttttttaaactgcggtgaggcgcatgccaaaggtctataaaagggggacctgctccctcttccctctttcctctttacccatcctcgactcacaagcatctgcgcaacgctcattgcgacccacattgcaacctcatagtgacccacacaacctcatcgcgactcggtcaaccatgagaatgctgatatggtggtgtcgaggacctcgaccgcccgacagcaacaggaatcagaaccagctgcaactaatcggatccgttgacaaagctgctattatgctgccacatttgttgagcttggttggtatgtattgatggcatctttgcatttcttgtcatcgggtcatcttatgacatgcatttttttgtagtctccaagcacttgtcactgaacatcctccagcttgtgagtctccccaatgttgcgaagactctggcttcaatgccatcaagagttctggatcaaggcctagtagggaccgcgtgtggtggtgggcaattatccggttagaaccaaccgttacgtattgcgtgtataattgcctagtagtagttagttagctgttccgaaccggttgtcgccggtttattccctgttgttgcagctagtgccagtttctgtcacctctacactatcggcaattgcattgctgttgacctcacaacgcaagaatcgtagaaaacccaatttttggatggtgaatccagtttctattagaactacagtgtatcgtaacctattatcgtgtaacagaagaaagtaaaatgcatacaagaaaacaaatgcccaaaacgttgcttatgcgaaactccagcctatcgatcaacaaatgtcaacagacgtcgtcttccagctcataaattctcagatttctgattccatccatattatccctaagtaccaattcatcttccacacactccttcgcgcctccggtcaggtgcaaaacgaacgcgaacacaaacgccttcatccgcatcactctccattcctgcagaagctcctgatgac

SEQ ID NO: 4270 - DNA, 883 bp, Spizellomyces punctatus
  source 1..883: mol_type = other DNA
tccgtctgcgatttttctttctgcctgtgggttggggagctacagacagctgtaatgatgcttgatttccagcatgcttcaggtcggtactggacagtatggacgagacaacattggtctgacaacattcactctcagtgtgagaggttgccctggcgagcccactcgcactaagagaaggagctggggccatcggaatccgttccgggtctttgtcggaaggttccactggcatttcggttgcttctgggccaagtggttcaaggattccctcatgcagcgcatttcctaccgcatcggattagccgcctgtcccttgagctttttcacggaagggagtaaaatcacctcttgtcgctagaatgtgcttgatttcgtggcatagactgatctggttggccacatatcctcggtcatcaatctctttttcgaatgccaacttgttcatggttagatgccactttggctcaatatcagataagtacagggggtcgtaccatttctgagccatcgattttggccgggtggacagggagaccgcatatttgcctggccttggcatccgtgacattgaagaacccacaagatttacaccttgtgcctacactttccaaactcgttttccgctcattcaagattgaactacgcgtcgccagatcttccccactagcatctttcaccaatgaaagagtcttgcacaccagagccaaacagttttcgcaagggaagagtgtggtagcgcacctggcgctgcaaccagagtgagaagagtccaccagtacatagcatcagaatgcgtcttacaactcaccagaaaagctcaccatgactatcgaaatttgacaatctccgcacctgaattgacggtgcggcagtagagcac

SEQ ID NO: 4271 - DNA, 1001 bp, Spizellomyces punctatus
  source 1..1001: mol_type = other DNA
cgcatctctgctgttaaagctctcagaaactcaacagctgctgcagtatgttccacttttaaagtcaaccgtagaactctatttcggtggaaaaaacaatgggaagaaacccacgaccttcgtccactgaagaagaagggacctgacttcaagcttaccgaagacgatcaacttcgtcttctatcagagtttagaaagaatcctggattgacaaacctgcaagctgctcgtttgttcgacaacaggatcagtccaaggactgtttcacagtacttgaaaagagcgaagttcacgcgcaagttattcagtgacgaacaagagacctattcttcggaggaatccttccagcttgtcaaggattattgcgcattaatgagaaccatcccaatgtcgcggcgagtctacatggatgagagctttatatatgacaacgaggctccgggacgaggtcgtagcgtacagggatgccctatatcacgggagcgttccaggcatggaaagcgatggacaatatatcttgcgatcagggaagacggattggttcatccaccgatcgttgacgcagaagcggctaatgacctaaacttctaccattatgtatggcaaaatttggttccgaatttacgcccgaatgaagtggtcatctgggatcgttcgggtaaagcgggacgttgtgtgaacccttcaaagcagcacttcaatcctggcgttcgacgacttatagaagacaaaggatgccaagttgtcttcttacccccacgaggagaaatgtataatccggtcgaactggtatttggaactctgaagacgcatctgcggaatctgtacactacgagtgtagcttgctcggaacaacgtccccgaacggaggccgaattgatcagagacttgcaatctgctgctagtaggataggtcgtgaacaatttgaaggttattttcgagagcgaggcactgagagggctttcagagcagtgtatccacatatcagtttgtagtgtat

SEQ ID NO: 4272 - DNA, 1598 bp, Spizellomyces punctatus
  source 1..1598: mol_type = other DNA
acagagttgggacacaggaactgttttttagcgggcaagatcattaggcataatggtgtgggcgggcgggagcacatatcaagatgccagccactacaatatcacgtgactaatagccgacttggtacccattgttttgtccgatacttctgccgatctacatccagtgcatagcggcagacacgatccttaataatttatatgcccttccaaccatcttgcagttttgaagcgctgattgcctgaccataatgcctggcatttttgttacaaacacaagctgtctcctcaaattgtaatatcctgaagaagaagcaaactacgttggaaacccgaatgcaagctattgcgatattaaagaaactcgggttagaaattcgtagcacgtctgtttaacgaccgtaaatatttcatgcgtacccgtacttacctcagagcacatagtgtggaggcgagtgaaaatggcactaggacccattattatccggattaatccggttaatcatatcgcacccccatctattgctcaaagcagtgtggcatgtattgtaatgtttttttttttaaactgcggtgaggcacatgccgaaggtctataaaaggggacctgctccctcttccctctttcctctttatccctcaactcacaagcatctgcgcaacgctcattgcgacccacgttgcaacctcatagcgacccacattgcaacctcatcgtgactcggtcaaccatgagaacgccgatgtggtggtgtcgaggacctcgaccgcccgacagcaaccgtgatcagaaccagcggcaaccgatcggatccgataccaaaacctactattatgctgccacattagttgagcttggttggtatgtatcaatggcatttcttgcatttcttgtcatcgggtcatcttctgacatgcagtttttttctctagtctccaagccttgtcactgaacatcccccagcttgtgacgctgcccagtcgattcgctcctggatgcaagagtgtggcttcaatgccatcaagagttccagatcaaggcctagtagggaccgcgtgtggtggtgggcaattatccggttagaaccaactgttacgtattgcgtgtataattgcctagtagtagcttagcttttccgaaccggttgtcgccggtttattccctggtgtagtagctagtgccagtttctgtcacctctacactaacaagccaagaacgcaaactcatttttaatgcgtattttcttgtccgtggtgcgttcgatccatgccttgaattccttgaatttggaaaggatagtctctgcttccttgtttgagatgcagtaagtaacgccgtacctagaggtgtgctcatttttaattaaataataagtgtgcaggatatggataatgtcactggttgtatccaacctcaatggttcaattgtttcggaatgctgaaagtggcactttcacatttagtctatgaactccccatccacttcgagtcacaattgaggagattcattttctttcccgtctcgatggtcgaaaacagttcactttcgaaagaacttatccagcatactcgcaataagcataggagcctagagacc

SEQ ID NO: 4273 - DNA, 462 bp, Spizellomyces punctatus
  source 1..462: mol_type = other DNA
gcgccctctgcgatacccccttgcgcatccaattctttccgccattttgacacaatttcctcgttgtgaattttggaggtccagttgggcttattccgaagcgcgttggacagtgatatgagtgacagctcgagaagggtcttgggcggatcccctgaaccgtagtcgtcaaagtactgcttttcctgaccatctgtggtatagaacggacttgggatccccgatagatcggagttgtcggcagggatattggctgccattttagagatcgtcctgatggacaggtaaaccaaggcgaagcacgatgaaccgcttccacgtgtcgctgcttatgtcaccgtgcaactttaattccgtgtttgtttccatcaaagcttacttttagagtatgcaatacacgtatgatgagcgatcacagagatagcctacgtatcaagtagaactacagtccgaactgatgct

SEQ ID NO: 4274 - DNA, 1621 bp, Spizellomyces punctatus
  source 1..1621: mol_type = other DNA
aaaaaagctggatggtgccgatttttgaaattccaactgacaaaataaagacatggtttttgtgaaatatacctgtgttactgttattcggaggatggctccagagcggtgttcgtctgttcgggtggttaacagctaaattgctgctcggctgaggctttgttgttttgatgtcgtccatgcccgacgaggaagggcgcttatgggtgaggaaattggcgccaagaggaatggagaacttgaagatgatcatcgtccttgatggtctctgtctataaaagcactacccaatctctgtcccattctatcattcgcaacttttactcgctcttgcaactttctctttaactttccttttcggatcataccccatctgaatcctgctttctgctcgtcaaataccagcttttgttctgtttcaagcttgttataccttgtcaactactcgttatctggacctatcaataccatttcatacccactttcgtattcttgttcagcataacctgaacgaatcccgtacatcttggatatctgctttacgatccgaactctacatcaccgctaccttgtggtgacatccagtgcactatattcctgcctaaaacttttgagatacctttcggatttacttataccagaacgtaaaagttcacttacatcgcgaagaaaaccgtaacaaaagcttttaaaaaacatcaagaaaatggccaacgttgctcctaccctcgctagtgctgatgcctctgtgatgtaagttttgcaattgtagaccttaccttgcatgggcatttattaatcttttctttcctagtatgcctctggcaaccgccactggcttcacagccagtttgaccgttactgaccccgacagtaacatccaggaagctaccgtttccgtcagcggaggttacacggccggtgatcagctcttcttcaccggtactcttcctgtgggaatgaccgccggcaactccaacggattggcagcggattctaccaacgcagatggagtgttgaaattcgctggctctttaactccagcggattatcagactattttgcagacgattactctcaaatcgtccagcaaagactgtgctccgagaactgtcacaattacggccacagatgtccctggcgcggtttctgctgcgaccaccacaacattcgacatcagcggtgctccttctatttgctatgttgctggaaatacactgtgagtgattaggacatcctttgattatacatagggaaatgctgtgaaataacatccttttactttcaacagtattggagataacaatgctgcgggcgtcactccaatttctggcgctactctctacgatgacactgccttgaagtcagtcagcatcgccatcaccgaagtcgacgctggcgacttactctcagtcgaccttacaggcattgcggacctcactgttggcaccggctatgacagtacgacaagaactttgacgatcacacctgtcgcaccggccactacggttgcatattcgactttccaatcggcactgcgcggattgaaattcagcagcacgggtgccctcggtactaggaccttgactgtgactgccaccgatgccaacgatttggtgca

SEQ ID NO: 4275 - DNA, 1444 bp, Spizellomyces punctatus
  source 1..1444: mol_type = other DNA
tttcacggagtagcgatggcaactttatacttttatgctgcttgggatcattgaaagtgcaattaaacatttgatgtcagcttgtcaacttgctactctatgtacatgccacctgttgaaagaagttgaccgtttcatgcttggctagcttaactttcttacggttactttgaggtaacttgatatgaggatttttgtgcttggccaattcttctgctgtacagtactgtacagtaagtgcataaaatgaccgcgcaccacgtgaccgcacatgacagttccctgggtgagtggagctgtcacgtgtagtcacatgggggtcccagtatacctgcaaatgctgtacatagtgtagaggtgattgaaaatggcactaggacccattattatccggctcaatccggttaatcatatcgcataatcagaacccccatccatcgctcagattggtgtggcatgctaatgttttttttttaaactgcggtgaggcgcatgccaaaggtctacaaaaggggagtcttctgtctcttccctctttcctcttcctctttacccatcctcgactctcaaagcatctgcacaactctcattgcgacccacattgcaacctcatcgcgactcggtcaaccatgagaacgccgatgtggtggtgtcgaggacctcgaccgcccgacagcaaccgtgaccagaaccagtggcaaccaatcggatctgataacaaaacctactattatgctgccacattagttgagcttggttggtatgtattgatggcatttcttgcatttcttgtcatcgggtcatcttctgacatgcagtttttttctctagtctccaagccttgtcactgaacatcctccagcttgcgagtctccccaatgttgcgaagactctggcttcaatgccatcaagagttctggatcaaggcctagtagggaccgtgtgtggtggtgggcaattatccggttagaaccaaccgttacgaattgcgtgtataattgcctagtagtacttagttagcttttccgaaccggttgtcgccggtttattccctggtgtagtagctagtgccagtttctgtcacctaatacactaactttttgagtgagatttgttgactattgccagtgacgagttagctaaaaacaagacttgaaagccaagatggtagtaacttggcaagcatcaaggcttccatgtcttttaagaagtagttggaaataattgcgttttcttggcttgtttggattcaccggacccaaatactacttctgtattcggagcgaccggacgttcaacaaaatcgacccttccgaaaatatcgcgaccctgaagaccaaggtatgcttatttgtgattataaataaagcatagagttttgtttatttagactctttaagtttagccaaaaacagtgacagacattgctaccttggcatctccg

SEQ ID NO: 4276 - DNA, 937 bp, Spizellomyces punctatus
  source 1..937: mol_type = other DNA
gtcctcaaaatcgtagtcctcttgtatcttttttgcagcactcttctttttgcgaggttgctgctgaaagatattgatagacatattactacccagttgcttaaacgaccaaggaactataagacagtggtaatttttaacttactccgttctcgtcttctccatcctcctcgctatcagaaccagctgaaccagtgtcggttttaggcatgtctccgcccgaggaggacgatgcaccgccatgcagagccgcaaccagctgcgcatagtcgaagacgtttgcctctgggttttccttgttgaaaggtatttttattcgtattgctttctggaaattatgttcttcctcgggcatgtcgccatgaccagtgcccatgcgtgggaacgacatggcgcaattgcacacttggaagatgagggatggtcgttcgacaatgggtacagttggtttgtctgcattgtgcaagtcaatgtcaaagagtaagaaaagagcaatgtaagtatgtgtaaaagttatgtgtgtgtgtaagtgtgtcagtaaaagtgtcgtatatagcttttcctacgcggttttccgctctcgtttttgttttttttcctaatggatattttggtcctttggggacgccaatgtaaaagataaaatacacgcccccgtcgtgtaaattccatcttttccaataggtagaagcctccttccaagctaaatcccatgtgtggataacgtacctaaatagaacaggtgaattgccgtcgcgtctcaaagatgaaaggaaaacgacgacgacgagaaagcggttcaacgagggtccgtttgaacagtcagcctaaaatcgcctctagtttgggcggtggggcgcagtctctctctccaaagtagccgttgttaagtttgaaccgcccccaaccaccaaaaaaagctgaacgggggaatgag

SEQ ID NO: 4277 - DNA, 939 bp, Spizellomyces punctatus
  source 1..939: mol_type = other DNA
aagataaacaaaacccaactattatatatgcaaaaaacgtgattccccccttgtttatgtgttgatccgttcaattttaggacatgtctccgacggcggcaagggcctccttctttgtactctgctctcgcaatgtgtcctgtttccatgcttcaaatgcgctcttgtctacaatgccgacttctcggaaatgacggaacatgttgggtaagagttctgcaacgatttttggcatcgttagaagtttgaaaaacgagttgctggcaatataaagcttcaaccaaccagtagggaatccaatattgccacagtacgcttgaatagcaaacaatacatccactttcttagacccatccacgtatggatcaaacaacggcttgagcgatgtcaacatctccttttgcttttgcacggaatcgggagtgggttctactggtttgttggggccgttcgcgaatactgtttgcgatgcaatgtgtgacaaaacacctattgtcaagattcgcacgaattccggcgacgcgcgcactttatcattgctcggctcctacaattacgaaacatccactcgttaaatttaccatttcaaatgagcaggtcaatgtactgctttgtttaccttcaaccaagccgccacagattccacattatcctttcctaatctccattttaaccccttcaatgtttcaagctccggggccaaaatgaaaagcccattcgcatccagccaatctgccagaatctcatcagtacgcttttcctttggccaccattctttgagatcgacagcgtcctttgtgacgatatcaactagggcgttatcgccatccaaagatttgatatctttgagtgtctcagccaacagccgcgcgccggggggtttcatggatgatattgagaggagaggagcggatagctcaaggacggtttgcagattta

SEQ ID NO: 4278 - DNA, 1523 bp, Spizellomyces punctatus
  source 1..1523: mol_type = other DNA
tgtgtgtttcctttttgaatgtgtgtgtacaaaagagaaagcgggggagccatatgataatgtatgtaattactttaaaggcaaaaggaaaagcaagtcaagaccccaaacacagctgatgatgaagatgatgatgatgatgatgaatgatctctccattttaaaggaaaaaaaagaacggtatcgacacacacacacactgcacacactttggttgctatggcccttttagcatgtggtttgactccccacacagctgatcacgttgggaattggagaggcggataaagtcgtagtgagttcaccacaaaagcaaaccatgcgtgtcgtaaaaggcagaattgaaattggatgggctggattacataagcacatcacatagtgtggaggcgattgaaaatggcactaggactcattattatccggatgaatccggttaatcatatcgcataatgagaacccccatctatcgctcagattggtgtggcatgctaatgttttttttttaaactgcggtgaggcgcatgccaaaggtctataaaaggggagccttctgtctcttccctctttcctctttacccatcctcgactctcaaagcatctgcatctgcacaactctcattgcgacccacattgcaacctcatcgcgactcggtcaaccatgagaacgccgatgtggtggtgtcgaggacctcgaccgcccgacagcaaccgtgaccagaaccagtggcaaccaatcggatctgataacaaaacctactattatgctgccacattagttgagcttggttggtatgtatcgatggcatttcttgcatttcttgtcatcgggtcatcttctgacatgcagtttttttctctagtctccaagccttgtcactgaacatcctctggcttgtgacgctgcccagtcgattcgctcctggatgcaagagtctggcttcaatgccatcaagagttctggatcaaggcctagtagggaccgcgtgtggtggagggcaattatccggttagaaccaaccgttacgtattgcgtgtataattgcctagtagtagcttagttagcttttccaaaccggttgtcgccggtttattccctggtgtagtagctagtgccattttctgtcacctctacactacacaacatgaacaattacacaatactgggctgcgtataaagtattccagctcttgcatctaatgctgctgcacatcttcaacggcaaacatttgaaacaatgacaaagaattcttttcgactgtaaaacagcgcttccccgcaaaaccgcacatcgtcatcacaaaggtgcaatgggactcgcagtattggaataatccatataccataaaaacaaggtagaacgaaacgagcacaatttgatgaaacgattttccaaatggatatattaactagatctcctcaaacaaaaaacaaaagaaaaaaagaaacagccatatgcgatgccttctgcacaccttgatgccatccatccgtgcagaaaaagaaatccggcagaaatgga

SEQ ID NO: 4279 - DNA, 531 bp, Spizellomyces punctatus
  source 1..531: mol_type = other DNA
ttcgatatcagttttggcgacttcatgatcccgccgcaaggcatagtacatggagcggtacttctctgtttcctacctcatcagcgttagttttccaccttttacgtacttatccagtaggtcaggcgtgtgcaattacctgttttaagccctttgagcgcttctcattttgctcctccatttcctgtacaactttaaggcggaggatttccaaatctctgcatatcacatatgtggatcaggacccctttttgcatgactgtagcgggcacatcaactaactttggttgtggagctttggaacggaattcttctagctcccgggatttagcgttaagttgtgatttaaagagtgatgttgattcgcttatttgagcctctaaagctgtctactctccaattttgttagttagttaaccgcaaattctcgtgaatgggtgctcagaatgtgatagcacaaccttctccttaaccgagagatcatattctcgactgagggtctcatatcgctcttgaaggcgctcatggccg

SEQ ID NO: 4280 - protein, 355 aa, Spizellomyces punctatus
MSTLACSKEQNETTSKSQVSNVDEAVAEGIAKLPEHKQMANAAQAELTAQCMQRHAKELEARTAAVTGGVIPKDSAAAVAQSAADRAKHIADDMQAIALHTESPAHKKKTPVAQAIELKIHAQDQMSQEMRDSIHSRVFKAEEGSEASKLMSEAQKMLHEVLSARQAKRKAEGLPERDDPVMKEIKEAIAKKELARELMSREMKQKGRVDKDSPASKLMSEADRMLRHIAEVHGGKNLDTGPEKAIIESLARIALHEDNLPVPSEGAREAIADVNQMKEGEKKKIRDALAKLTHEEVEELPKKEQVKIALEKKAKAAELMSQEMKQKGRVDPKRYGDEAAILQSEADSILQPREE

SEQ ID NO: 4281 - DNA, 678 bp, Spizellomyces punctatus
  source 1..678: mol_type = other DNA
cctcgacttcttcatgcgttaattttgcaagagcatctctgatctttttcttttcgccttctttcatttgattgacatcagcgatcgcctctctagcaccctccgatggaactggaagattgtcttcatgcaaggcaatccgcgcaagggactcaataatggctttctcgggtccggtgtcaagatttttgccaccatggacctcggcaatgtgccttaacattcggtcagcttcgctcatgagcttggaagcaggggaatctttgtcgacgcggcccttttgtttcatttcgcgggacattagctcacgggccaactccttcttggcaattgcctctttgatctctttcatgacgggatcgtctcgctctgggagtccctcagcctttctcttcgcctgtctcgcactcaatacttcatgcaacattttttgcgcttcgctcataagcttcgaagcttcgcttccttcctccgctttgaaaactctgctgtgaattgagtcgcgcatctcttgtgacatttgatcctgagcatggatcttcaactctatggcttgggcgacaggggtcttcttcttatgagctggtgattccgtgtgaagagcaatagcctgtattgggcacgtcagaatctgcaatgaaaggtgctccggtatggagtacagcgaacctatgatct

SEQ ID NO: 4282 - DNA, 1444 bp, Spizellomyces punctatus
  source 1..1444: mol_type = other DNA
tttttaagctgtaatggcgacgttgttcaatttggttcccgaaacatagttggctctttctgtgaccttacgtgttcaaaattgtctttatatgcctcattttctttcttgagagtctccacaagtgataaagcaactttgagcttttcaagtactgcttcttgcgtttccgccatatttcttgttgttaaaccgaaccctggctggtgcagcgtgaagctgctgcgcacacataacgcagcgacgcgttcgttgattacataatatcgaggtgagggctcatcctgcgatcaatactcatgcaacaccaggagctctcccattagtgagcatcagtacgtctccataagacttcgaacatactgcttgaactaccatctatagcaagaacgttcgtttggtgatggggggaaagatgcacatttggagtttgagatcactacatagtgtggaggcgattgaaaatggcactaggacccattattatccggattaatccggttaatcatatcgcataatcagaacccccctctatcgctcttggtgtggcatgcatgtaatgtttttttttaaaattgcgatgtggtgcatgccaaaggtctataaaaggggggccttttccctctttcctctttacccatcctcgactctcaaagcatctgcacaaatgctcattgcgacccacattgcaactcattgcgactcggtcaaccatgagaatgccgatgtggtggtgtcgaggacctcgaccacccaacagcaaccgtgatcagaaccagtggcaaccaatcggatccgataacagaacctactattacgctgccacattagttgagcttggttggtatgtatcgatggcatttcttgcatttcttgtcatcgggtcatcttctgacatgcagtttttttctctagtctccaagccttgtcactgaagatcctccagcttacgagtctccccaatattgtgaagactctggcttcaatgccatcaagagttctggatcaaggcctagtagggactgcgtgtggtggtgggcagttatccggttagaacaaccgttacgtattgcgtgtataattgcctagtagtagttagttagcttttccgaaccagttgtcgccggtttattccctggtgtagtagctagtgccagtttctgtcacctaatacactatgtatttcacctgtacagggatgcagagaatacgcatcatcatatgggcacgggacacaaacgagaattctcggctactgctacagtctagcgctattcctctctgggctgcagaatggaatctgcctcactttgcaaaatggccgcttcatctccataacgctttggatcaaccctacccttctgcttcatctcttgggacatcaactcagctgctttggctttcttttcaagcgcaattttgacctgttccttctttggtagct

SEQ ID NO: 4283 - DNA, 531 bp, Spizellomyces punctatus
  source 1..531: mol_type = other DNA
ttcgcattcagagagcgattcacgatggcccagcacggacctcaatacgcaagacgatcacaattccaattcccgcggaccggtacagtttcccagccgtattgttctgaaacctacggacaatcccctcgcagcgcatctggctaacctgatgaactcaaatcacaccatatcaccgcatactcaaagtgaggatatcgaacatctagcatttcgtgcgcatcctggaaagaacacagctaaggagaatggactggttcctgctggtggtcctggaagttctcagactgcatcgaaacgctcatggcgaagtcgcaatgtcatgaaaatcaaacttcctccgggggtggttgttccccaggcgttgatatctcctgggctcactgagaggatgttggaagctggcttacacccgcaaactggagcgcccttatctgaaggttgtcagcgagagacgagatggaggaaggcaacatcagtgaagagtgacggggcagctgaagctgacgaacgacgacgcaatacaggcat

SEQ ID NO: 4284 - protein, 563 aa, Spizellomyces punctatus
MLYFRSIRASRPAAHLLGKRCLMTASGRGRATTTPNHSSHAARRVMGLSSHLRSTDLPNSGGVATMATSSSSSGQVEVRHQKMQSVRLFLLNRPKSLNVLNRSMVNNIVPQLQVWEESNLCKVIVLTSVEGRAFCAGGDVKALITGALSGKPEDLAEALKFFEEEYQLNHLIGTLKKPFISIMNGITMGGGVGLSVHAPFRIATENTLFAMPETGIGLFPDVGGSFFLPRLDGELGTFLGLTGWRLKGEEVFQAGIATHFIPSARLPSLMSRLAELETDELDVINGILEEFVGDIEPSKWNTWSLGGQIGNAIDRCFKFNTIEEIISALENENTPWAGEVLEELKKMSPTSLKVTLQQLRNGRKLDLASCFRMEYNMAREFLDTPDFYEGVRAKLIDKPPRTPKWQPPWEEMSQLSPSIVQRYFTPAAPSPRSVPKNSRIPSEKLRFLTSLTYHDYPHRTLSGLPSVHDIYRVVIGEGRRGQSLAAPQTKEEVVEWLEQNWGAYDSGVIGSERQMLPQIVTIEGGFGRGKAGLREKVLSVLDRYVEEVSKPGVQKRLEWKGPK

SEQ ID NO: 4285 - DNA, 1258 bp, Spizellomyces punctatus
  source 1..1258: mol_type = other DNA
gcaacggtatgctcaggtgcggatgtttcctgtgagggatctggtgctaatagattgaactatggacagatggcaacttcttcaagctcctcaggacaggtcgaggtccgacaccagaagatgcagtctgtgcgactgttcctgctgaatcgtcctaagagcttgaatgtcctcaaccgaagcatggtgaacaacatcgtgcctcaacttcaggtgctcaagctactgttgcaagcatgtggttttcaagtcctaattccttgattaggtgtgggaagaatcaaacctgtgcaaagtcattgtgttgacgagcgtggaaggacgggcgttttgtgcaggtggcgatgtcaaggctctaattacgggtgctttgtcggggaaacctgaggatctggcagaggcgctcaagttttttgaggaggagtatcaattgaaccatctgattggaacattgaagaagccgttcattagtatcatgaatgggattacaagtgggttttgtggagagtttgtcatttgttgcaaagacaccaatttatgatttgcgctcaacagtgggcggaggtgttgggttatcggttcacgcacctttccgaattgctaccgagaacactttgtttgcgatgccagaaactggcattgggttgttcccagatgtcggtggtagtttctttttgccgaggttggatggagagctgggcacatttttgggattgacggggtggaggttgaagggggaggaagtattgtgagtacttttttgaccacgttctgggaatttggaagtgtggcgtagattgaccgtggatttgcttgtgtggaaaaagtcaggctggcattgcaacgcattttattccctctgcacgattgccatctctcatgtctcgtcttgccgaattggagacagatgagctggatgtaatcaatggtatcctggaggaatttgttggtaagttgtggcagctattctttggatgctataggcgtggaattcaaagattctttttttctgtatcaaaggcgacatcgaaccttcaaaatggaatacatggagcctaggcggacagattggaaatgccattgaccggtcagttgtagctgagccgatctgctaataatgttatcattgacgatgtcaacagatgtttcaaattcaacaccatcgaggaaatcatttctgccttagaaaacgaggcatgtatcctccctgactgataaatatttgattctactgtctaatgtcacgatcgactattta

SEQ ID NO: 4286 - DNA, 1444 bp, Spizellomyces punctatus
  source 1..1444: mol_type = other DNA
agtacgaaccatgtcaacaggtggattgtctcgcatggctctcgatagccaacagcatcccggtcggcgaccctctcactcctcacagcccgtcctttcccagcctccatctcaacgaccacccttaccgggcgacgtccgattgaagcatcgtcgcccatcatcccgaagtactgttagcgaggaccgagtatcaattgatcgacatcgcgtcagaggcagacgagtgtcttcgagcgcgagccagcatgaaggaataatactcgaggaacctggaagcagcttttgacgagaaggctctatgggattcaatagtagttagtttgtagtgacagtcgacaaaaaccgcacaggctaatacatagtgtggaggtgattgaaaatggcactacatacatacagaggacccattattatccggattaatccggttaatcatatcgcataatcagaacccccatctattgctcaaagcggtgtggcatgcatataatgtttttttttaaactgcggtgaggtgcatgccaaaggtctataaaaggggggccttttgctccctcttccctctttcctctttacccatcctcgactctctaaccatctgcgcaactctcatcgcgactcggtccaatcatgagaatgcagatgtggtggtgtcaaggacctcgaccgcccgacagcaaccgtgatcagaaccagcggcaaccaatcggatcccataacaaaacctactattatgctgccacattagttgagcttggttggtatgtatcgatggcatttcttgcatttcttgtcatcgggtcatcttctgacatgcagtttttttctctagtctccaagccttgtcactgaaaatcctacagcttgcgagtctccccaatgttgcgaagactctggcttcaatgccatcaagagttctggatcaaggcctagtagggaccgcgtgtggtggtgggcagttatccggttagaaccaaccgttacgtattgcgtgtataattgtctagtagtagcttagttagcttttccgaaccggttgtcgctggtttattccctggtgtagtagctagtgccagtttctgtcacctctacactattacatgaagcatgatttaattgccattaccatggcaacaatgtgacaaagtgaaatccagcaattgtgagtttggttggccagtagtagaatccgcagatcccgtcgcgcaagcttgagaacgacggtttttgccatcgcctttgttgcctttcaatgttatattttaggagcatcagagcaagtcggccggccgctcatttactcggcaaacgttgtctcatgactgcttccggtcgcggccgggcaacgactacacccaatcacagctcacacgccgcccgacgggtgatgggtttgtcgagccatctgagatccactgacttgccaaattcagggggagta

SEQ ID NO: 4287 - DNA, 528 bp, Spizellomyces punctatus
  source 1..528: mol_type = other DNA
caactctccgctcgtctttggcgcaatgccatcactacacagcggcttcgccgtcttgattatgctctttgccatacatttttcccgccgcctcggaggcgtgctcgtaatatacatgtgctggcaatggtgggcgacaatgtatctacgacatcactacatggtcgatctattcgtcggtgcactgtactctactgcaacatatttcctcgcaagacgatatctggttcgggcatctgcgggaatggggttggttagccttgcaaatgactacaaactactggatgtggtggtgatgggggatatgatggaggcgaagggtaatgtcggatcggatgggtcgtggacagaaacaatattaaagagtcggagagcgggggagagggattcattggtacaaagtacagtccctctggagggtgtactaattgatgggagaggggagctatagcattggtgatgattttcttttacttgtctttttttttaatgttcactactggagcttttttctctttcatatttttc

SEQ ID NO: 4288 - DNA, 341 bp, Spizellomyces punctatus
  source 1..341: mol_type = other DNA
caggattgagcatgtctcgtgccacttcagcttactataatcatcatcgttcacccttacaccctgttttggcctgggatacgacaatattgacaccgaccctttgtgtggtggaaatgctggggacagggagatggttcgcgttggacgatctcaccatttcctcgccacgcgtgaaggtaggcgcgaagctaagctcgttgcgcccaccggcccgaccgccgatcatgtcaaaaaaaggcaactcttgggaaagagacacgcgagacaacagataaaagcaaaaaaataaaaagcttagcgtttccttattagggcaaataaggcaagccattcaatga

SEQ ID NO: 4289 - DNA, 1536 bp, Spizellomyces punctatus
  source 1..1536: mol_type = other DNA
tgtctggccgagttaccgtcgaaatgcttttgtcggtagagggttggatgatgggatatggagatggtgtctaatacttctgtgcgggtttggagttatcaaccgttattttgtacaatggtttttcgtttttctttattataataagactctaggttggaggaaccatgcggacccccctcggcactcgcgtcaattggcttttagcctttcatagtttggcggcgattgaaaatggcactaggacccattattatccggattaatccggttaatcatatcgcataatcagaacccccctctatcgctcagattggtgtggcatgtattgtagtgttttttttttaaactgcggtgaggcgcatgccaaaggtctataaaaggggggccttttccctctttcctctttacccatcctcgactcgaagcatctgcgcaacgctcattgcgacccacacaacctcatcgcgactcggtcaaccatgagaacgccgatgtggtggtgtcgaggacctcgaccgcccgacagcaaccgtgatcagaaccagcggcaaccaatcggatccgataacaaaacctactattatactgccacattagttgagcttggttggtatgtatcgatggcatttcttggatttcttgtcatcgggtcacctcgctgacatgcagttttttttagtctccaagccttgtcactgaaaatccaccagcttgtgacgctgcccagtcgattcgctcctggttgcaagagtctggcttcaatgccatcaagagttctggatcaaggcctagtagggaccgcgtgtggtggtgggcagttatccggttagaacaaccgttacgtattgcgtgtataattgcctagtagtagttagatagcttttccgaaccggttgtcgccggtttattccctggtgtagtagctagtgccagtttctgtcacctctacactactttagcgtcatgatatgcgttgatcaccctggaaattaataaatgtttttttaaaggggacgctttgctcattggttcgcgcttcccacctccttctgcaaggagagcgatttggtttttacttggtgggatcatctcttcaggtacagaagagacaaacaaaacaaacttccaattcatgtaaccaaattccattagagaaaaaggtttcattttccacacacgtgaattgccctaagcgcttaggtacatgaactgtctcaatgtttcaaagcgtgtttttgttacatcctatttgacatgaattcattccgtaggtggttcaaagattcatccgaaaagacactaaatatttgggaaagtcggtagcagtatcgatgagaaagataatagagataccccattatattgcattgtaggagaagctattgctttgttcgtattcacagggtggaagctgctggtggatgggcgcaagttttgtcctttttgagactggttctgttttgttccatatgtcgaactgagctgatagttgacgggcgcaacccacatcctttactggagtgtaatggggag

SEQ ID NO: 4290 - DNA, 462 bp, Spizellomyces punctatus
  source 1..462: mol_type = other DNA
aaccactttattaacaaggatctgaacgtcttccaaaacccgggcggaccactcaacacatgtgtattgtttgatctggatgtccagacggttgaagtatttgaatttaaacttaatgagtatctaacatttgaatcaaatttcaaaatcattggtagttaggtctaacttcatacaatgataggcacagccgacgataggatgaaggtaagaaggacgtttcatgcccgctcctattaataatataaaactttgattctgatatcgatatcaatttttttccccagcatatcgaaatgagcagaaacccgcgaccgaaataatagttgtcctgtggtgctgcgacgtgaaaccttatgtggcgataagtaaacatggtgtgtgcctaaacgaatcgtgcaaacgtagatggggtcaagtcgtggcatcctatggttgagccgaagcctttacctaagaatc

SEQ ID NO: 4291 - DNA, 332 bp, Spizellomyces punctatus
  source 1..332: mol_type = other DNA
ccatatgtgagactcggcggcgctttgggcattttgtgaaatgaggtgttaacaggtttctgcaagagtataaaactaatatggtaggtaaaggacttgttcctacccctatatatatctgtgtttgggatctggattttcagaatcgatatacttaatgtggaaccctaaaagtagtgtcaattcgccaggggcaaaacgattttatggagttaagagcactttttcaactgcaaactgagattatgctcttgggttcccattagtatcgaatgttgaatcaaaaaactaaatgattaatgcttctccgaagaaacttaaaactaaaaaaa

SEQ ID NO: 4292 - DNA, 1610 bp, Spizellomyces punctatus
  source 1..1610: mol_type = other DNA
ttggttctattcattatagttgtatgagaggtgttaaatggccttggaatcgctggttcctttctcctcatgaaatcatcgaggattccatgaactctgggacgcagggtcgtatatcaactgaaaatggctggcgaatgcaacagcataacccggtatagaaggtgcctatttaaagagctttaaagagcagtacgcccacattccgcagatcacttacgcccacttacagaaagaaacagggagcgcgctgataacaaaacccaaatgacaaagaacctcccctctgctatggttattaaaagacatggagatatggaacaagccaatagcatatatctcctacatagtgtggaggtgattgaaaatggcactaggacccattattatccggattaatccggttaatcatatcgcataatcagcaccccctctaactcaaaaacggtgtggcatgcatgtaatgtctttttattaaactgcggtgaggcgcatgccaaaggtctgtaaaaggggagcctttgctctctctccccttcctcaccagttcctcgactctcaaaccatctgcgcaaccctcatcgcgacttggtcaatcatgagaacgccgatgtggtggtgccgaggacctcgaccgcccgacagcaaccgtgatcagaaccagcggcaaccaatcggatccgataacaaaacttactattatgctgccacattagttgagcttggttggtatgtatcgatggcatttcttgcatttcttgtcatcgggtcatcttctgacatgcagtttttagtctccaagcctttgtcactgaacatcctctggcttgtgacgctgcccagtcgattcgctcctggatgcaagagtctggcttcaatgccatcaagagttccagatcaaggcctagtagggaccgtgtgtggtggtgggcaattatccggttagaaccaaccgttacgtattgcgtgtataattgcctagtagtagcttagcttttccgaaccggttgtcgccggtttattctctggtgtagtagctagtgccagtttctgtcacctctacactattgatgagaaacacaataatacaaaaaaaggattcgcgtatcgagttaaggtgaagagttcagaaagctgcaaatgtatttatcgagttcgttcaagtaaccatcgaagcgtgcgcggggaagttcacgcttgacccggcgaaacattcttcaacagacttaactacgccggcaaaagcgcagatctttcgaaaataggtgccatgggtttcaatattttccccgacgtcgtcctcttcatcattttgtatcgtgctgttgtgtgtaggttcagatagcattgacaataaatctcctctaacccttcaatgaccgtccatgttgtctctataccttctccatgtcttcgactgacaacagatggggcaatggtaacagcgacgttaagtcctgcccatcctccaacctttccactgcttctcaaatttcctcataccatttttcagtgtcgttcaatgagaatgatttggacaacggtaacatcgattctctctgatcgtgtgtggctctagcacgtttgatcttggcgccctcttcttcttg

SEQ ID NO: 4293 - DNA, 612 bp, Spizellomyces punctatus
  source 1..612: mol_type = other DNA
ctctagcacagacgactctacctttttcaagctggcataggcatcctgcaggttcttcaggtattctgcgcccctctccacttgctagagcagaatgagctcatatcctgacgagatccagaatacaatcaattaccattttccgaacaacttccatgtcctttatcagtacagaaaacggatccagtacgttgttctgcatgctaagtgcaagattcctctgtatggtatcaagcatgaggacgacactcttagtttttgagattatagagtacagcgactcacatgggattctgcgattttggttgtttgatccacataatcgtagaagacttgccatacagatctgaaagcaatgcggaaaccaattagaaagctattctaggttctaacatttcaggagaaccaatggacggctgtaaaacgcacgttttgaccaattgttgcctgatagcttcatcgacagctcctgacggtacattcgatgatcctcctcgaaacagcgtgggtccctctgcggttgatgacttgttcgcattcgaagccgtagctctttgaaacccttgggaaagtttgactgaaaacatacaaatgcgcgtgagaaccaatgaa

SEQ ID NO: 4294 - DNA, 1029 bp, Spizellomyces punctatus
  source 1..1029: mol_type = other DNA
gaatcaagcattggttggacggcgctttggctcgttgaaccatttccattcataccctactcaatcaatgaacaaacatgaccaaaagcatctgttgtcagtctgtagctcatagcctgcctttagcaatgaaggctcatccagtctggaatcacatcataaagtcggaatcagtcggacgtggcttgcatgcctacgtcacgctcattctcacttgtcattggccgaggaataggccggtacctgcgccacatggacaatggagggaggatgattgctatggaaaacttccaacggtttgtccccagcgcgttttgttgaggacgacgaaacaagccaaatcgcagaggatcaaaaaggacatccctcccatcagcttccctcatcctcttattttattatcctcctccgctttcttcctcggttcttgcgcttgcgaggtcgttagcaactatttcacatacccacggcattttttttgcatccgttcccattcttaacgcaccccatttcaacgatacacaatgctctcatccgcacgcgtagtaactcgtcctcttctccgcgcccaaacccgctcatatgcggtcctagcagacgcttactcggccgtggggtacacccgaaagggcgaccaacccctccaggcccccaaagtcaatgcgacagtgtcaaagagcgagagtggcatcactattgcgagtgtggaccatttgggccctgtgtcgactttggcgcttgttgtgaatgctgggagtcgatttgagagtccggatgctcccggtgttgcgcatttctggaagaacacgcttgtccgggtgagtgtgggcttttactgtaggtggacacggctcttgggtttgtcttccatgcgagactgcctgggagttgcaattggctcgcacagcgcatgagtttggttttatacggatcagaaatttctttttaacgcatatatgtgtccttagaacattgctggtgacaatatcgtgaggacggtccgtgagacagagcttcgtggtgacaccc

SEQ ID NO: 4295 - DNA, 1427 bp, Spizellomyces punctatus
  source 1..1427: mol_type = other DNA
ttcctttttaaggtaacatgcggactctatcacaaaggtagttttggcgtatgacagctccaaaagcctccatttgcaaaatcccttgagcgacttacataacccctttgcatactccatttccacctgtgcccgctttttcaaaaagctggcaagatccttgcattgccgcaccgactcttctgtatactggagtacattcgtgtaggtcatgctggtcagaccagcttggtcatattataaagcgatgatccaaccggcaaacccagaacgacaaaatgccccgcaacaaagaaacttgtagcaaaacaacccaaacgcaaccggcgggaacccccccccccccagctggttgcacaatggataagtcatgtgatttattaattaacgttatacacgtgatacattgatgattcatcaaactgctgtccatccaacgaggaatatagtgtggaggtgattgaaaatggcactaggacccattattatccggattaatccggttaatcatatcgcataatcagcaccccctctaactcaaaaacggtgtggcatgcatgtaatgtctttttattaaactgcggtgaggcgcatgccaaaggtctataaaaggggagcctttgctctctctccccttcctcaccagttcctcgactctcaaaccatctgcgcaaccctcatcgcgactgtcggtcgaatcatgagaatacagatgtggtggtgtcgaggacctcgaccacccgacagcaaccgtgatcagaaccagcggcaaccaatcggatccgataacaaaacctactattatgctgccacattagttgagcttggttggtatgtatcgatggcatttcttgcatttcttgtcatcgggtcatcttctgacatgcagtttttagtctccaagcctttgttactgaacatcctctggcttgtgacgctgcccagtcgattcgctcctggatgcaagagtctggcttcaatgccatcaagagttccagatcaaggcctagtagggaccgtgtgtggtggtgggcaattatccggttagaacaaccgttacgtattgcgtgtataattgcctagtagtagcttagcttttccgaaccggttgtcgccggtttattccctggtgtagtagctagtgccagtttctgtcacctctacactacaagcagatcacccttttgtttgcccagaggtgcttgctgattgtaaaatgtcgcacattgagcggtttttaattgtcatgcactgcctgatgtcgagcttttggaccaacacatgtaaactgatgtggatggtcatgaaggtatagaggagaaagacccgcagcaagtcggttctcttttgcagagtccatgatccatcaagccttttggctcatgccgtacttatcaggattgcccatcaacctcacccatcaagag

SEQ ID NO: 4296 - DNA, 736 bp, Spizellomyces punctatus
  source 1..736: mol_type = other DNA
acgtttatcgacccctccgtgtgtgttgggactgatggctattcaagagagcggcattcatgttggtgcacatgttcgtaaaatctggtcagtgtgacgttgtgcctggtccgcacatcctctcgcactggacagctgtgacctcgacacggagggactgcgtaccagttctgaacaggctggcggggcgtacctctgccgtaacacccgtgcgggttaatctgtatcactaggtcgcctggtctctgcggttttgaccaagcagcagggtacatagcagcaggcgttcttttgatgcattgatcccaaagtgcatggcaatgctttgagcttgatctggcctttcggctgtgtcttgctgacaagggccgcagaaatcagatcggatatatggcgttcagtttggatgcgggcgttcagatggccactgttcgtaaagctcggcactttgtgtcgacccgtatcagtgaatgaaaaacctgtatgaaagcaccgacgccagtccatggggacgtttcccgctgagacgtctttgtgcggctgggtcgctagccctcacagcccatatatcgacgcagtgtccacttgaactatgataaggctatgtgagattgaatcaatagtaacacctccttctgtactctagtggtgtgatttcaatgataaagggcgtccgcaagttgcagattacgggatttacgcgtcgatttcactcacacgtacattatatgtactc

SEQ ID NO: 4297 - protein, 144 aa, Spizellomyces punctatus
MPKVYKRGAFALSPLPHQFLDSQTICATLIATVSRIMRIQMWWCRGPRPPDSNRDQNQRQPIGSDNKTYYYAATLVELGCLQALSLNILWLVTLPSRFAPGCKSLASMPSRVPDQGLVGTVWWWAIIRLEPTVTYCVYNCLVVA

SEQ ID NO: 4298 - DNA, 637 bp, Spizellomyces punctatus
  source 1..637: mol_type = other DNA
atagcgagcccttctcggaccaaacgttcattgacgctcacgtctcgactattcttggtgtcgtatagcacaacgttcagtgcttgccctgagcccacagagctcggtacgcgtcctagaatccgtgcttgaagggttcggccttcggtcagattacggagctgctcaaaagcttcttcgccataatcctggtctaatgttgggacttggaggtacgcgagtttggcttcagatgcttggggattgagcgtcatggtgttgaaagagctgtccagggcgcggatgcgggatgctgggactgtttccgagtttccatagtcgacgtacgtgacgttgtaggtcttgtcggggttgacctttgttacccgtgcgcggtaccattggtcgtcggcaccgaattgggcgctgcagtattcgccgttgcgtggttggtatggtggagctgctgcgctcttatggtgaagggaaaaatcggccatgaggcgttcgaggcggtccaaatctagatcaaactccacgtcaatacggtgtgcaattcaatcatctcgagttagaacgcaccggaaccaagaacctgcaaaaatatccgaccgccgtcttcaatatggctaacgatcacgtctttggtttcaatcgg

SEQ ID NO: 4299 - DNA, 1612 bp, Spizellomyces punctatus
  source 1..1612: mol_type = other DNA
gctcatgactgcatatgggactggagggtgtcgtctgaatgcacgccatgatgcacgctatgatgcacccgtaagagtgatttggtatcagttctccttttttttggggggggggggggtcaactcaggagcggaacctcaagtcgtacggtcggctccatctccacaactataggtcatccagcacaacaggaatgaaaactaataataacagtgctgctctgaagtcaagcgggcctatggcccaatggacaaggcgcctgactacggatcaggagattccaggttcgaatcctggtaggctcgtagaggaattcacgcgataactttttttccagtcgaacttttaatttgcgattaagtacttaggaaaaatataacagtgtggaggtgattgaaaatggcactaggactcattattatccggattaatccggttaatcatatcgcataatcagaaccccctctatcgctcagattggtgtggcatgcatgtaatgtttttttattaaactgcggtgaggcgcatgccaaaggtctataaaaggggagcctttgctctctctccccttcctcaccagttcctcgactctcaaaccatctgcgcaaccctcatcgcgactgtcagtcgaatcatgagaatacagatgtggtggtgtcgaggacctcgaccgcccgacagcaaccgtgatcagaaccagcggcaaccaatcggatccgataacaaaacctactattatgctgccaccttagttgagcttggttggtatgtatcgatggcatttcttgcatttcttgtcatcgggtcatcttctgacatgcatttttttgtagtctccaagccttgtcactgaacatcctctggcttgtgacgctgcccagtcgattcgctcctggatgcaagagtctggcttcaatgccatcaagagttccagatcaaggcctagtagggactgtgtggtggtgggcaattatccggttagaaccaaccgttacgtattgcgtgtataattgcctagtagtagcttagttggcttttccgaaccggttgtcgccggtttattccctggtgtagtagctagtgccagtttctgtcacctctacactaacagtgtaccaactgcaggccatggctcaatagatcaggcggctgagtacggatcagaaattccaggtttggctcattgcaaaccatgtttttggcgccagatagagaagtttgatttttggactgtgatgcagaaatggtatcacctaaactacattcctacatagtacaaaagttcaactcaaccggtcccagaatacagcacaagatttgctgttgacagatgagaaataatgccttccttttgggcttattcatcgtcctctgtgaaatccccataccgccacatattcgcctaaaaacaacaataaaacaacggataagtatcaagcacatgaagaataaaatgtacgagatataaacttcaccctgctctttttagcatcctcttgtgcttccatcacagcgtccaaaacactctttttcgccgtattgccagtagccccattcgcacgtttcgcgttttgctgtcccgcaaagcgttttctgtatactttctccaca

SEQ ID NO: 4300 - DNA, 602 bp, Spizellomyces punctatus
  source 1..602: mol_type = other DNA
ttcattagccgccgtttgtccaccaaactgacgctctgattcgaaaacacgtcctcttttgagccaggtacctatacatcacagcataagcctctcatacaatcaaagatgagcacacgagcataccagctcacatttcccctgccacgaaagatacacgctctccaaagccttaaattccaaatacttgcccacccccgacgatatcaacaattccaccaaaggcccccggttgtataggagtttgggtgctagatcaatgttaaattgccgggattgggttagaaggtgggcaaggatggtgtactttgggaggagagggtcggatgggtcgagtgatgcgatagtgacggagggatcgggatcagccaagagggatttgaagacggggacgaggttggcattttgcttgagaaaatcgaggatagtagagattgagttgggtgttggcgtttgtattgggccattggtttccactgctccgtcgtcagtgggcaagtcctgagctacctcagacgtcgctggttcctcatttgcagtgttttctctcttttgaatacccgcaagtctctcgacctcctcttttgacccacttcgcagca

SEQ ID NO: 4301 - protein, 329 aa, Spizellomyces punctatus
MILPSAVYWIVAERVGKMSVPGLQALHAGYALLQLLCIYFAVLAYRRSRNGAPGAIVFAVFAGLKCFDDLLVVIGPWLDASPTHHAVLRGLSAFSYFAGCLTQPSLFLVAYELCHTLHGGPKRRLLSRDQVGRIGALALTCSFATYEILDYALYSKVADSIVLRKPWGVPVYEVERGIFSASVYTRFATCLMLLAAGGCLWARTHYPWLSLLQLVVLLGQVATFHAASYQIFLDSGWDVVFSLSLAMAHFHVMGNQEEEEKFEPLLFGDDSARWYGAVEVWADGHPASSSPTRWKGKEGIVIVSQPDGGQTGNPPYTAVERGDSDRTIA

SEQ ID NO: 4302 - DNA, 612 bp, Spizellomyces punctatus
  source 1..612: mol_type = other DNA
cgcgcagagtcgtcgccaaacagcaacggctcaaacttttcctcttcctcttgattacccatgacgtgaaagtgtgccattgctaaagagagagagaatacaacatcccagccagaatcgagaaagatttggtacgatgctgcatgaaaggtcgctactagatgacgagatgtaaatcatgagtcacaacagttgatacattgcgcgttgtattatgcattccttaccttgacccaacaaaacaaccaactgtaataaactcagccatggataatgtgtccgcgcccaaaggcacccaccagccgctaacagcataagacatgtcgcgaaccgggtatacacgctcgcactgaagattccacgttctacctcgtacacgggaacaccccagggcttccggagcacaatcgaatcggccactttggaatagagagcataatccaagatctcatacgtggcaaaactgcaggtaagtgctaaggccccgattcgacccacttgatcgcggcttagcaagcgtcgtttcggacctccgtgtaaagtatggcatagttcgtaggcaacaaggaagagggaaggttgcgtaaggcatccagcaaaatagctaaaggc

SEQ ID NO: 4303 - DNA, 1605 bp, Spizellomyces punctatus
  source 1..1605: mol_type = other DNA
cgacctccacatcaccgtacgccgcattaaaagggttcgtctcatctttacaaggcacacatcagtatctcaccgaaacggtaaactacttactgtcatacctcgctctacacacaaaaccctcaaaaaggtctttaaatcaaaacatgcaaaatggtccccgtagaatatgttgcggtcgaggtgcaaaactgttttaccagctcgtgctagcgaactttgaacatgtcagcaactagtgttcgcagacagcgcgggtggtcgtgctagcgggtgcctacctggcaataatggactctgatagaccagtacccagaacaatggcgtcaaagtgcgtttgttccagcatctgaaggttggtttcacctttgaagtttggtctaatgaaggcacgatctcgcagatctctcaacgggcgcgagagccgctctcgttggtcattcgcaccgctaagccacatcatagtgtggaggtgattgaaaatggcactaggacccattattatctggattaatccggttaatcatatcgcataatcagaacccccctctatcgctcaaagcggtgaggcatggatgctaatgttctccaaactgcggtgtggcatgctaatgtaactttttttttaaactgcggtgaggcacatgcggaaggtctataaaaggggggccttctgtctcttccctctttcctcttcacccatcctcgactctcgaagcatctgtgcaactcttctcatcacgactgtcggtcgaatcatgagaatacagatgtggtggtgccgaggaccttgaccgcccgacagcaaccgtgatcagaaccagtggcaaccaatcagatccgataacaaaacctactattatgctgccacattagttgagcttggttggtatgtaccaatggcatcatttcattctgtcatttcacctcgctgacatgcagttttttgtagtctccaagccttgtcactgaacatcctccagcttgcgagtctccccaatgttgcgaagactctggcttcaatgccatcaagagttctggatcaaggcctagtagggaccgcgtgtggtggtgggcaattatccggttagaaccaaccgttacgtattgcgtgtataattgcttagtagtagcttagttagcttttccgaaccggttgtcgccggtttattccctggtgtagtagctagtgccattttctgtcacctctacactaacgttcggcaaaccaaataagaaagacgactactgtcgttttgcgttttccaaaatgcacctcaaccaatgcgcccatcataaaataatagcaatatccgttatgacttgagatacagttttatatgtctgtatttcaaattacgagatcccataatgtgtccagataaaatatacaataaaccccgtataaatatgcccagctatgatgattttcctcaggctatcgtacgatcgctgtcgcctcgctcaactgccgtatagggtgggttgcccgtctgccctccatcaggttgcgatacaatgacgattccttcctttcctttccaccgtgtcggtgatgaagaagctggatgtccgtctgcccaaacctccacggctccataccaa

SEQ ID NO: 4304 - DNA, 904 bp, Spizellomyces punctatus
  source 1..904: mol_type = other DNA
cgacgtctaaagcgtgaggcactaggcgaagacgccgttacaaaaccacgcggcaaaaggacgcaatacgttgaccgtgctgccatgcgtcgaaaaatgcatggtgtggacgcaagtgtcatggagttccggcaggagactcaggaggaatccagtacccatagctttacgccttctgttccaacgcctacacacgcgacgcctattacagctgccgaccctaccaacattgggagccggatgctgcagaagatgggctggaccgaagggcaaggcttgggtgctagcgggggtggaagggtagatcctgtggctgtttccatgcggatgggaagacaagggttgggaatggggacacctgaggaggataacattggcggaatgagtggaagaaaggagacgttgtatgaagcgacgatgagaagggctagagaaagattcaatgagataaataatgattgatgttacatagcgtggtcccatcagtcggaagagcgccgttaatgtgcgcatccagctcattcatgttcttatagatcacctcccaaagtgattcttactgatgacaacggtcacccaaagttgtggtatctaaaaagcgtgcattctggcatcttaactcgacgttcctttcaaccggcatcaccaattctgattctgattatcataaatggcccactcgaagctctcatgcaatgcctagattcaactgagtaacccttcccagggtcttacatatcaaagtttgagtttcggcgcacatctcaaccacattttcaaaatgtgcatttagctgcacatagaggcaatcgcatacagcgattcgatgtggattgcaaaagatggcattgcatcactcacatgtaaagtcatttataatctgccattatctcgaggtgaagat

SEQ ID NO: 4305 - DNA, 1372 bp, Spizellomyces punctatus
  source 1..1372: mol_type = other DNA
catttcaacaatagttctaagcacacatcaaatctccctagacacctacgtacaccatcaagcattatacctacacctcatcctcatccacaaccacccctccacatggatgcaccccgcctatagcttcctcgtcttcgtcacaggacaaagatccagtttccgatggttggaaaccatgtcgtcgcgcaacaatatgaatgtgataggcgtcttcaaatgataatgaatctcggtcgccaccatttgggatgacggtgtcctcatctgggaactgtataaaggaccccatggcagtcgagataccttcttgaaacttttcgtcgccgcccaggacggggaattgaccgttcggaacaagggttttgtcatccctgaataattatacaatttagaatgtgcagaatgttgcaggacaatgacaggcacttacccatagggtttaggcgcctcccgtctaatctgaacatggaatgcagccggaaggtcgctcaaatcggggctattcggttcaatagagacaagagaccgcgacgcatcaaacacttgaaagcaaaactgcgggcccatccatactggaggtctcggcgctgtttcgtgcgtaacaatttcaatctttgacggccactgtatgcgtgatggtggtgatgattttgctgctgctgttgttgttgaagttgttgttgttggagtttgcgttgggttggttcgagtgggagcaggaggacgagaaggagatgtttgaacggagcgtttgacttcaccccagtccatttcgcgcttcacgttccattccatgacttcagagactttaacccgaatatgctgctttttgcctccaaatcccaaccccgggaacgcactaaagagccccgacggagagaagcggtcaaatgacgacgggctagcacctgtgctggatcgcttaggtgagggcaggagggtttgagggctggctggggtgggatcttcgagtaggacgtcaacatgatgcatcatgaggctgccgcggtcggtaggatgaaaggtgaggaggcgttggcggaacagtcggatcgcagagactggagcttcagcttgagtgtgggtccaacttccaccacatgtcgtgccagcggaaccgacaggactgctcctgtcgtgggaacggcggtcataaacagccgcggccgtgtctttgagcgcgttcttgtcgggaaggaaggcggcgatcagaggggcacgaccacttccgcaggtgatgctatcattagaaaccacaccttcggaccatgcttcgcttttcggagacgcctcgacaggttgacgcttgatccttgccactgggtacaagctggcaatccctccttcagcggtccccggtaccaaagtc

SEQ ID NO: 4306 - DNA, 1704 bp, Spizellomyces punctatus
  source 1..1704: mol_type = other DNA
tacctgatttgacttttagcgattttgccagagctgaagacaaacagttttgtgattcacccctacccaccaaccggtagtcaccagagtcaacaccctcccattccctgctagccctctatatctcctcgtaaaatggggcgctggcggcctttcaatcgggctatatttgaagagactggcgattggccgcgtactggtcgtccaaatatccaccggctcatgttccatctcgtcaccaaaatgccagtactgttataaaccgaaactggggatatgagaatgtgagtcgtgaatctcacccgatcatttggggattggcctcatgtaagtgaccatggcgtggaggtgaataaagtgtcaaaggttttgagagagttgtttgaggggaggaggttgcagtaagtcaattttgtaatgaactgtaatgaagaagatgaacagcagatgtgtgtttcgagcagtgtcaacaatggatgacgaactatctattgagtactgctatcgcaggtctcgtggtgaaatatctatgtttctccaaaagcaagtatatcatcgatatagatattccatctcacgtatttgcactgagaaacatccatagtgtggaggtgattgaaaatggcactaggacccattattatccggattaatccggttagtcatatcgcataatcagaacccccatcattgctcaaagcggtgaggaggcatggatgctaatgttctccaaactgcggtgtggcatgctaatgtagctttttttttaaactgcggtgaggcgcatgccaaaggtctataaaagggggacctgctccctcttccctctttcctctttcctctttacccatcctcgactcaaagcatccgcccaacaagtctcagtccaatcatgagaatactgctctggtgccgaggacctcgaccgcccaacagcaaccgtgatcagaaccagcggcaaccaatcagatccgataacaaaaacctactattatgctgccacattagttgagcttggttggtatgtatcgatggcatttcttgcatttcttgtcatcaggtcatcttctgacatgcagttttagtctccaagccttgtcactgaacatcctctggcttgtgacgctgcccagtcgattcgctcctggatgcaagagtctggcttcaatgccatcaagagttccagatcaaggcctagtagggaccgcgtgtggtggtgggcaattatccggttagaaccaaccgttacgtattgcgtgtataattgcctagtagtagcttagttagcttttccaaaccggttgtcgccggtttattccctggtgtagtagctagtgccagtttctgtcacctctacactatcctatctgtcaccaactgttcacagatacttcatggaggtcagaatatttacccatatatagaagattaccccttgaaatttttgtagcccggttagctcaatcggtagagcgtgaggctcttaacctcaaggttgcgggttcgacccccgcatcgggctgtttcataggaatgaggaatgtttttttccttaaccgcagctgtcgcgccttgttcctggtggttgcttataagtaagatatttgtcgacctttgacgacgcacagcaccgcaattatcaagaactccatacatcggcaagtagctgcatgatgacagactggtagttgcagttgccgtcag

SEQ ID NO: 4307 - DNA, 1426 bp, Spizellomyces punctatus
  source 1..1426: mol_type = other DNA
ttgacgattttcacctcatgtttgccaatgccatgcaatacaatgtagatggttccgaagtctacgatgacgccgttcaaatgaaacacgtatttgattccaagattgctgaattggcacctggaggcgatgtacccattttacccattgatgaagccgaacccgttgttgaatcactcaaaagaaaacgctctgaagcttcctctcatttttcggacgatgagaaacgtaaacggtggtcggatgatgatgatagtgttgataattttaaaccgaaaaaacgaaaacgggagagtggtgttccggggattccgtccaaatatggtcaattacctaaaattaaaatgaagcttcccccccgggtgcttgatgagggtgctcctgctggagagaatttggaggatggagagattatggaataatctgtgtgtgtgttgttgtaacagacggggtttgtgattggaatgtatatatataatgaaaaaaaaaaaaaattcaaaaaaataaaacattactcgctctgctgtgtagtttttagttagcatttttttgtcgtattgtttggaaattgaatgatatgcacacgcaaaaaaaaaaaaaaccattttatgccctttataagacttttgtgtttatcatgactctgtttatggtaactacgatggatctactctctcttttagtaattcctgtgtcttggatgtacgtttactaccaaacaatgtaccattaacggtagaatcaaatcgcaagtgcgtgagaagagaagggtcgaccataatatacaggggccgtaccagcattttgtcaatacagatgcaaaagttttgttttgtgatagagtaccaatccgcgtgtaatccaaccacacacacagcattccctaatatcatatcaactagatggggatatacatatctggtagggactcgttcgtggatgggagggacgggggtgaaggcatggtaagtaaactctccgtaaacacattgtttagtgggaatgtgagatccgcggatgggtttttgggggttggtgaggggattgatgctgtatttgagagtgatacggattctttttggtgacaagatggtgaatgtgttgttgggttcttttgttccagagtggggagggatgggtgtgtggtcatggtaggtagactttttgtcgatgtatcgtttggtggagggagagtgtccaattggaatacggatggcttcttgggggttggtgaggggattgatggtggaatgaatggtgtgttggattctttttggtgaaaagatgttgggtgtgtcgttgttttctcttgtacctccaaagaatgtcgggcaccatccagaaatacatgttcattcccaataactgaattcctctccccactcagcaccttcccatcccccacggtcgaccatttaatatccac

SEQ ID NO: 4308 - DNA, 612 bp, Spizellomyces punctatus
  source 1..612: mol_type = other DNA
gtttctcccgccatgacttggcaattgatcaatattgattgtcaacacattggcaaaaacacaagtacctttacgtgatcttgaacgccatatgggggatatccaacctgtgctgggttggtcctcgttatctcccagtgcatcgaaatctagatgggagttcaaacaaatggaaatatcatcaactctggcaaggcgcgtttcccttaaaccctgacttggcgtttcctccaatctaggaacatattgaatttaccagcgattaggcggttgggtataaaagggatataatggaatatgagttttgtttttcttgctccaatttggtttctactttttctttaacctgttgcaaaagcactcggtgctttttgcgcgaaaaaaaagatggagtctactggagcaaccgacaagaaaacaaaaaaagtggacttggtaagttctgtttgtcattctaattcccaaggtagcttgggctagttgaattgactctgattatatacatctatagaatgaacatcttctttcgtttgaagaaattcaaaagcttcacaaaacctccttcgatgctcgcaaaccggttgcatcggctggtctcacacccaccgaggt

SEQ ID NO: 4309 - DNA, 1444 bp, Spizellomyces punctatus
  source 1..1444: mol_type = other DNA
gagcgtacattgactcttttcccgtgtaccttccatccccgctctggagactctagacattttcaattgatgtcgtgatcgtgaagagaatgtgggtgggaccaagagggtttggattggtttgggggttttggtggtttggatccaggttcctgtttgttttggcatgtggtgtgtgatgtgtagtggtgtgatgcgagattgtacactgggatttcttgggtagtgaggctgctgacatctatcatcgttctgtgttgtccaacgcgttcggacaagtgtcacgtgccgagtcggagcctatcggagccgtggtacagggtccatagtgtggaggtgattgaaaatggcactaggacccattattatccggattaatccggttagtcatatcgcataatcagaacccccatcattgctcaaagcggtgaggaggcatggatgctaatgttctccaaactgcggtgtggcatgctaatgtagctttttttttaaactgcggtgaggcgcatgccaaaggtctataaaagggggacctgctccctcttccctctttcctctttacccatccttgactcaaagcatccacccaacaagtctcagtccaatcatgagaatactgctctggtgccgaggacctcgaccgcccgacagcaaccgtgatcagaaccagcggcaaccaatcggatctgataacaaaacctactattatgctgccacattagttgagcttggttggtatgtactgatttgcatcattttatttcttgtcatcgggtcatcttctgacatgcattttttgtagtctccaagccttgtcactgaacatcctctggcttgtgacgctgcccagtcgattcgctcctggatgcaagagtctggcttcaatgccatcaagagttccagatcaaggcctagtagggaccgcgtgtggtggtgggcaattatccggttagaaccaaccgttacatattgcgtgtataattgcctagtagtagcttagttagcttttccaaaccggttgtcgccggtttattccctggtgtagtagctagtgccagtttctgtcacctctacactaaatatttggtggattccagtgaggtacaaacgcttacattctggtataggtcaacttgctcaacatttgtggaaaagttgaatcccaccaataaaacacatattcatgcactaggaagactttggagggacgaaactaattctttggtatattttaggaatgataaacattgggcgataccatgcgattcgaaaaagaaacaagagtcgttggaacgagtttgtttgtttacaagtttgttcgcgtgttcgcgcacctaaaaggctggttcatgcctggaaaatctccaaaagaaattctacaacaagggaatagaacaaatgggaaattaaaaaggcttagttcctgtaatctcgcgaccaa

SEQ ID NO: 4310 - DNA, 1537 bp, Spizellomyces punctatus
  source 1..1537: mol_type = other DNA
tagaactagtcgttactgattacacaaccaatccaaacatacagtacgttcgtattcgtgtttgtttattggtttttcaaaaactgatgagatgctagttttccaatagagatgatcccatatacccgtcttactcccgacatgctattactcgtcacactctggtacgcacgcaatatttcttttacgttttataagctcatggttttttgtttagggaccaagaacccatggatccaccgttacaaaaggatacatatatccacctccggaacctccgcatcgtgtcccgttataataaattacaagtcgttgcacatggtgataaaatgcgaactaggacgagtcatataacgatcgtgaatgatggagaccagattgatcggatgagagatcgggaaaagaaatggaaggccttgcaaggggatgttttgaatgtggttggaccttcacaaacctacacctccatgctccaaaagaaatatcgacgacccctattcaacagttggtcaagactcatccacatactctgcgtgtccaactcatggaccaccttcccttgtatgtacgtcaatttacagtgtatgaaagtaaatgggttgagttttcgatgcttgttaccgatgggacggggtttatgcatgtttttgttcatggaccgaggattgtaagttgatcttgcactttttttttttttggtttttgtgttttattcatgctttttttttggtttaggatttgttgggaccggcgatgcggttggatggactgacggttaatggtgttgtggagcggtgtggagttggtcgagaggttgtgtgtagagttgtttgggatgaggggtggaaggttgttgggtaacatcgtgcacatgtagatgagatagtgcgtgtatggcatgtttggggcgggtttgactctgcgaaaagtacccaccgcttcgtctatccccgtaaaacatcattcaatggatccaatgtatgagcatttggaacaccgtgcatcatagtatctatttcccttttacatcctgctcaatctcccatacatgcgttttcaattccaaatgcgagacattgacttcatcctacacatttatcaacaaaaaaaaatattaataccccaattgcccaataaactgacatgactataaacttacaatcaatttcaacagttcattccgcagcgcttgcagatccccttttgtcgctgctttttgcgtgaatccattcaaatccttttcgagtgtcgtgattttttgggtatgatcacgcaactaacagtcattcaaatccataagccaaacaaccacaagacatgatcgaaagcgagtccaaacctttgcagtcgatttcgccaaatcctctacattggataataatgcatttgaactctgttggtattcgtctaggaggtacacgtaggatgtggcgcccgcgagtgtgatgcccagtaggaatccaataatgctatttccaaatcatgagcatacatgctaatacccacacgcatgcaagcaacaaaaaacaggtgtaca

SEQ ID NO: 4311 - protein, 160 aa, Spizellomyces punctatus
MLRPLCRMRFRPNRLTQYRFNTTEAAIVSPPSSAFVTPAPEVPKRSGGGFFRGGIIGFLLGITLAGATSYVYLLDEYQQSSNALLSNVEDLAKSTAKLRDHTQKITTLEKDLNGFTQKAATKGDLQALRNELLKLIDEVNVSHLELKTHVWEIEQDVKGK

SEQ ID NO: 4312 - protein, 239 aa, Spizellomyces punctatus
MTIITMIGDGYKVPGEEPSLETTAMGLGAKAVQSFTPLEQICRHLCGFHVYAHDMTRQVEAHHYCSHLSSDMLQCVIYDSPEKDARLIGVEYIISSKLYNDLPESEKVYWHSHTYEVKGGILTLPVSRFVPAAVHEEIERKELSKVVNTYGKTWHLWQIDRGDILPYGPPSLMMSFTSDNQIDPKLLEQRDKREGVRTEDLIERRKDIPIEPRPPGAQEKLLEEKMAWQAKMEKIPLLC

SEQ ID NO: 4313 - DNA, 762 bp, Spizellomyces punctatus
  source 1..762: mol_type = other DNA
gctgccgtgcatgaagaaattgagaggaaggaattgagtaaggtggtgaatacctatggaaagacatggtaaatctttgttttgcgttcttacttgcgcgtttaatgtggtttgcatacgagtcttgattgtgctgtgtctatgttaggcatttatggcagattgatcgaggtgatattttaccatacggtatggtgttatttttgaaaaatcgttacccgtaggctacatccaccctcccaactattaggtcccccttctctcatgatgtcctttacgtccgacaaccaaatcgatccaaaattactcgaacaacgggacaaacggtgcgtacccttttcctccaccatctccatacacaactttattgaacacccgtatcgaattttcttaatagcgagggagttcgtactgaggacctcatagaacgacgcaaggatatcccgatcgagcctcgcccgccgggagcgcaagagaaactgttggaagagaagatggcatggcaagcaaagatggagaaaattccgcttttgtgttagtgggttgatatgtttgcacgcttgttgtgggcggtgtgtatttcattctattggattgcacaaatgctccatgcggggtggttctatcttgttatatagcacgggttttgaaagctgctagcaaggtttaccctacggtagtcattccatctatatgctatattctagattttgttccattgtccttctcacctgtggttatccacctggccagccattgtcc

SEQ ID NO: 4314 - DNA, 1681 bp, Spizellomyces punctatus
  source 1..1681: mol_type = other DNA
ttaccccccacgaaagaatcccccacccgaccgctttggtacctctggcgcaggagtcacgaatgcactagaaggaggcgaaacaatggcggcctcggttgtgttgaatctgtactgtgtgaggcggttaggccggaaccgcatacgacagagtgggcgaagcatcatgaaaaacgggatggggtgcaacgccgagaaccagcacggtcgggttgttcaagttgctggttcggatgggtcatttgtaggcatggtaacagtgtcacgtgtcgaggaatactgatgacgtgagcgtttgtgaaggttcatcgttctgtaggtatttataaaggttctcatttttgggcaaaggttttggttgtggggttgaccaagtacccaggattgatcatttcgagctaaacatgtcacttgagaatgaaccaaagaaacctgtttcgggaggagcggctgcggtatggcatctatgttacatagtgtggtggtgattgaaaatggcactaagacccattattatccggataatccggttaatcatatcgcataatcagaacccccatcattgctcaaagcggtgaggaggcatggatgctaatgttctccaaactgcagtgtggcatgctaatgtagctttttttttaaactgcggtgaggcgcatgccaaaggtctataaaaaggggaccttctccctcttccctctttcctctttacccatcctcgactcaaagcatccgcccaacaaatctcagtccaccatgagaatactgctctggtgccgaggacctcgaccgcccgacagcaaccgtgatcagaaccagcagcaaccaatcggattcgataacaaagctgctattatgctgccacacttgttgagcttggttggtatgtactgattgcattttgtcattctgtcatcgggtcatctggctaacatgcagcttttagtctccaagccttcgttactgaacatcctctggcttgtgacgctgcccagtcgatttgctcctggatgcaagagtctggcttcaatgccatcaagagttccagatcaaggcctagtagggaccgcgtgtagtggtgggcaattatccggttaaaaccaaccgttacgtattgcgtgtataattgcctagtagtagcttagcttttccgaaccggttgtcgccggtttattccctggtgtagtagctagtgccagtttctgtcacctctacactatcaaatgactataataacaatgatcggtgatggatataaggtcccaggcgaggaaccctccctcgaaacaaccgccatgggtctcggtgccaaagctgttcaaagttttacacctcttgaacaaatctgtcgccatctctgcgggtttcatgtgtatgcgcatgatatgactcgtcaggtaaaatgtacacccatcattatttatcctagagttcacaaaaacactaaaaacaaaacttgtaggttgaagctcaccattactgctcgcatctaagttcagatatgcttcaatgcgtaatatacgatagccccgaaaaagatgcaagactcattggcgtcgagtacattatctcatctaaactctacaatgatctccccgagtctgaaaaagtgtattggcattcgcatacttatgaagtcaagggcgggattttgactttacctgtttcgcgcttcgtacct

SEQ ID NO: 4315 - protein, 1275 aa, Spizellomyces punctatus
MPFWSRNKKRRARTPPPNLQTPPGQHHSPSALSFFGFRKRSPSPFTALRSRDSPSSPESGGHGGSARDLPYHPHHYSEGFLSPPDRRFNFELEYDRAAAEAASDKRAPRVPSKAHESVSNKPATTPVVVVTSTGPSCVIQCDRHKTVQWALEKASTLLPKDHSELVEARGPDGKKALGSERVLDFCGVNKILVVTVATPEFNRRASVDSPGGYISARDGREAFDFEDLRRSSKLDREERHSRRLALVGSKGRRDADVSSRTLLPESREQSFDAGIEADILAGHPSRMPRPVSPRFDRAATPSPLPFEGRRSSRDERASRPSRDDYAERRGSRNSREERSSRDSQDDRASRTSRDESRSSREFGRARSPVRSSSRLSGLDSVMEDLAKMADHEGGWVSAVSPNQRISHGDPSSGRAGRVLEDQKMVHEAESYSSLAAPAAEVSGSQRSQSPLPRLLTQPLRRSPSESSSLLAQESPVSRNPLNRHDVDRRLTEILTSVGMEIDDALNELSLGDERTDSEPPSPPPTSPVDELPDFDDVSDDSSSRRSVRKSRRLTRISRASALDIFAALEQQAKEEPTPDLDTPMLALPVSDTASRRVSRISRASALDMFSSMRSSSRSDDGEDEGYEQVEREELIDAEPRLSSVDVPNPTPAPAPPPPPSDSVVPSALVTTAPAAPTLPVTSTEAKAGPPPPPPLPPVMVFEESAIPPPPPPPPVMTFEPSAIPPPPPPPPVMVFEDSSIPPPPPPPPVMVFENSPIPPPPPPPPPMIFENAGSIPPPPPPPPPPPPALGIPPPPPPPPPPPGAGPPPPPPPPPPGGGPPPPPPPPSTAAPASAGDLQSAFLAELRDPNRRKKLRKVKVPERPPPSEADKAAQEAKQKEAEKGNDEAERQELYIELLGYMEAPNGNIEELSDKAKTQTNLVRSFVFTLIRKGWVRGYRVTDNLPEEKETKGPKGKSKGRAPLKVWLGREGMMCIELEDLTGEELVAKVGGEKADPLSMPNDDGNVVKRKGEVARVYMYRFDEKSKQHVLDEVALVATGSFPKKTKRFDDPEPPQDSSLHNRRKWEAWNEKKLQYLQSDWPQFELIFNKLMATSSIVQSIHHQLHQTLAEMRAMGEAMHDTFAAFPVTQVRRIVESIPGRIKEVAKKLQKQTGIIIRDESLKLTPEFLRLMNLAPDGTDKQDTATGPGIGGAPISETPSNPMARPATLVHSQTAPSLSTAAEPNATGEQSGSANMLNPKGMITMAGLPFDVLLPLLKKSFNKQEIGDDRLSRRLTL

SEQ ID NO: 4316 - DNA, 581 bp, Spizellomyces punctatus
  source 1..581: mol_type = other DNA
tgagctgcgtcgcaaatcttcaaaatcaaaagcttcgcgaccgtcccgggcgcttatatatccaccaggcgagtctacactagcacgtcgattgaattcgggagtcgccactgtaactacgagaatctacacacaccgtcaaatgaagtttatcagtatccatatatgcaacattaccagaactgcctgatcatatatatatgtatagcgattcttccagtcaacactcactttattgactccacaaaaatccaaaactctctcgcttcccagagccttcttcccatcaggtcctctagcctccaccaactccgagtggtcctttggaagcaatgtactagccttctctaacgcccactgcacagtcttgtgacgatcgcactgtattacgcacgacggtcctgttgacgtgacaacgacgaccggtgtcgttgccggcttgtttgacacgctctcatgggcctttgagggtacccgaggagcacgcttgtcagaagcagcttcggcggccgctctatcatattctaattcaaagttaaagcgccggtctggtggagaaaggaatccctcgctgtagtggt

SEQ ID NO: 4317 - DNA, 462 bp, Spizellomyces punctatus
  source 1..462: mol_type = other DNA
tcaagtattaaaaaagaagaaacaagaaagctgctaccaatccaaaagctacatataccctagcaactactaacacatactatgtactgtcgcagcagaaatcacacccttctttgggcttctgtccaagtgactagagaaccagtgctgactgcagtaaactggcactaaatatcccttaacaaagacacatgtatcgatgacagcatgtggaatgatgtacatgcggtcacctatttggtactgaactcattcgaccatgtgtgcgtgatgaagtgtcactaaacaatttccgacggtcagtcacaccctcattacagtattaatgcacactatactcaccagattcgaaatcccggaatgggttcgcagctcgtgcgccattccgccctgctccccgtcgagatccgttttgcgtggggtcatttaccaagtcagacccgagtatcaccctccttccct

SEQ ID NO: 4318 - DNA, 1610 bp, Spizellomyces punctatus
  source 1..1610: mol_type = other DNA
gtgggtggtagggtagatctctggcactgcctccatgtccaccagactctggagacgagggagaatcacgagaacggagtgcggtaaacggcgaaggactccgctttctaaagccaaagaaggacagtgcggaaggagagtggtgctgtccaggcggcgtttgcaggttaggaggaggcgtcctcgctctcctcttcttgttcctactccaaaagggcatcctgacggaagcaacggccgcaaccaatgctgcctaggtaagttcccaagagccaagtgggtttgtaaccctctccaaaacagacgaaaacgtccaccgtgaaaaagaaatgtttaaaatgctcttgaaaaacgctgaccgtcaaccggagcgtgggaattttgctttgtagaatcctcaaatgaaagtgtcacaagttgcgtcgtgtgttacgtaagcagtgactaagcacttaccgctcgaggagaagccctgattcgttcctgcccttttggattcaaaaatatcatagtgtggaggtgattgaaaatggcactaggacccattattatccggattaatccggttaatcatatcgcataatcagaacccccatcattgctcaaagcggtgaggaggcatggatgctaatgttctccaaactgcggtgtggcatgctaatgtagctttttttttaaactgcggtgaggcgcatgccaaaggtctataaacgggggacctgctccctcttccctctttcctctttacccatcctcgactcaaagcatccacccaacaagtctcagtccaatcatgagaatactgctctggtgccgaggacctcgaccgcccgacagcaaccgtgatcagaaccagcggcaaccaatcggatccgataacaaaacctactattatgctgccacattggttgagcttggttggtatgtactgattgcatcattttatttcttgtcatcgggtcatcttctgacatgcattttctctagtctccaagccttgtcactgaacatcctctggcttgtgacgctgcccagtcgattcgctcctggatgcaagagtctggcttcaatgccatcaagagttccagatcaaggcctagtagggaccgcgtgtggtggtgggcaattatccggttagaaccaaccgttacgtattgcgtgtataattgcctagtagtagcttagttagcttttccgaaccggttgtcgccggtttattccctggtgtagtagctagtgccagtttctgtcacctctacactacgtactctacaggttgaaaatggtaaaggacaaaaaggatgcatttgaacgaaatgaatatccaaaaaggatgctgtagatgctagatatgaacttggaaattcgcattagaatcaaaagttgaagacggttcatatgtcaacagatcaaaacacaatccgccaccaaacaaccgattggaaggggttgcattggttccatagaaaatcagggcctacacttcgcttccgacatttgcgctagaatgcagaggttttcaacgttggcaacatggggcgagccaaggcaatcgctgttgccatccgaatgcattgtataattgtaatgcggtaacgagaatgatattt

SEQ ID NO: 4319 - protein, 139 aa, Spizellomyces punctatus
MANQSKPQAAGGISALVQSASGRVLPLISTAQSYAIATLSTSKAILDRYPPLKAFVYTLGGAAAVPLAVFTGYGAATGAVVLGVAGTAVTFVQGGFLAFGGFILFWFLAGAFVLASILTFWFTLAYFAFQVAKRLEGTA

SEQ ID NO: 4320 - DNA, 1031 bp, Spizellomyces punctatus
  source 1..1031: mol_type = other DNA
tcgcccattattttatagagtattcttgcgcggctagtcagcgacttagaccaccgccacaaaagcatatcatagattcaacccccgcattatcccagtctcagttacggaccagccagttctaagttgcactccaccgttttttatgtctccaatggcgtttacgcccacctggatttaacttccaactctgatacgtgggataacacttgttataaggtaccaccaatcaaacccctgtatcgaacacgtacattgcgagctgtgtcccaacacgctgattcgataatttttgatgcagaacgtgctgtcgtcgagcaagacaactttcagtgaccttgtaaaacaattgtgttcactctgccaaggcatcaaataatatcagtaggtgaaccgcatatgcggatcataggacatctcaaggcaaaagacttgctgcaaggacggcggttcaacagagtaatataatattgcaacccatgccccccatacacattaaagcaatccaaacactgtaatccaggtatcaaattatgaggcccgtttctaagctaaaactaaacgcaaaaatgagggaaaaccaaaatcgaaccgcaggtttaaagctgcttaagcagtgccctcaaggcgtttggcgacttggaaggcgaagtaggccaatgtgaacctataaaaggaaagggagcacgataagctctcgtagaatgtcatgtaacttattgccgacccttaccagaaagtcaagatcgaggcgagaacgaaagctcctgccaagaaccagaagagaatgaatcctccaaatgcgaggaaaccgccttgtacaaaggttacagcggttccggcgacaccgaggacgacagcgccagtggcagcaccgtaacctgtgaagacagcgagaggtacagcggcggcaccaccaagagtgtacacaaaggcctggcagaatttcacggggaattgatcagtccaagtgacttaacaaaacaaggaccactacggcacacaaaccttgagcggggggtaccggtcga

SEQ ID NO: 4321 - protein, 319 aa, Spizellomyces punctatus
MTLNGATHFSVRNDTQPCFHLRSLPYHLKAWLASDPTVERCPQQPDLLVAKYQDDLQTLRRFESNLLDPYRIECLQQIYDRVIAQFRNYRPILADIKREYDLCIAALLNIVQEKVYLRSKCQKLMCENGSEEEFDHLRSLLVNLTFRKQMIEKENAELKKTCEEEETKFLTTLGRSFVQNVSSDVFSDKQMQLLRSKDRWASVDKWMHEKAADEDVFKELLTKFEANPDFYQTLLESEDLADIYQPKESPEMRKINAEIEEQHKIMQERKKELADLKTRQRGAQGELKSVFEQIEHIEVLIEVAQSRLAAVDRENKSDE

SEQ ID NO: 4322 - DNA, 1255 bp, Spizellomyces punctatus
  source 1..1255: mol_type = other DNA
gtgcaacacacttttccgtgcgcaatgatacccaaccatgctttcatctccgttctctgccatatcatctgaaagcgtggctggcttccgacccaactgtggaaagatgtccccaacaacctgacctactagtagcaaagtatcaggatgacctacaaaccctgcgcaggttcgaaagcaacttgctagatccgtataggattgaatgcctccagcaaatctatgatcgggttattgcgcaatttcgcaactataggccaattctggcggacatcaaggtggatattctcactgcttcaaggacccaaagtaccttctcatgagtcgcacccatttttcagcgcgagtatgacttgtgcattgccgcactgctcaatatagtacaggaaaaagtctatctccggtcaaagtgccaaaagctaatgtgcgaaaacggaagcgaggaggaattcgaccatcttaggtcgctgttggtcaaccttacttttcgaaaacagatgatcgagaaggaaaatgctgagtatgttctagtttttgatatatggagcggaatttcactactactggtgtagattgaagaaaacctgcgaagaggaggaaacaaagtttctgacaacactaggtcgatcttttgttcaaaatgtatcgtcggacgtattcagcgacaagcagatgcagctactacgctcaaaggataggtgggcgtcggtagataagtggatgcatgaaaaggctgcagacgaagacgtcttcaaagagctgcttacaaaattcgaagccaatgtaggtgcacggcgatgattcatcttaattggtcggggcactcaaagaaacacaatttgcagccagatttttatcaaacgctgctggagagtgaggatctggccgacatatatcaaccaaaagaatcaccagaaatgaggaagatcaatgtaatgtgtctagtgagaacaagcaaaagtcctcgaatggagtctgaatgctattttttacctctaggctgaaattgaagaacaacataaaatcatgcaagagcgcaaaaaggaattagcggacttgaagactcgtcagagaggggcgcagggggagctcaagtccgttttcgaacagatagagcacatagaagttctgatcgaggtggctcagtcaagactagcagctgtagatagagaaaacaaaagtgacgagtaggcaatagatcagatcgtttttgtgcacaaggttcagtggttgcaatggtaaccagcgtatttaa

SEQ ID NO: 4323 - DNA, 1610 bp, Spizellomyces punctatus
  source 1..1610: mol_type = other DNA
ggatggccttggatgttgagagggtagcaatggcataggactgagcagtgctgataaggggaagcacacggccgctagccgattggaccaaggcggagataccgccggcagcttgaggtttgctttggttagccatactagatgaggatagattctaaacaccgtgttagcagagtctccaacaacaaaccagaataaaatcccaaggacacacgcgcttccatacctttaaaaaacactgataatgttggagtgcgcaaaagattgcaacgtactgcttgcgatgagcaaaagatgatgggaaaagatgggggggcgagagcgggggttcgatatttgaaggtgtgaagacgtcagcccctcgtgcaaatctgcacggttcaaatctttctcatattccggtttgagtgtaatgacggcatagtcatgtattgtagtgtgactgtgccagtgacgtgatgtccatagtgtggaggtgattgaaaatggcactaggacccattattatccggattaatccggttagtcatatcgcataatcagaacccccatcattgctcaaagcggtgaggaggcatggatgctaatgttctccaaactgcggtgtggcatgctaatgtagctttttttttaaactgcggtgaggcgcatgccaaaggtctataaaagggggacctgctccctcttccctctttcctctttacccatcctcgactcaaagcatccgcccaacaagtctcagtccaatcatgagaatactgctctggtgccgaggacctcgaccgcccgacagcaaccgtgatcagaaccagcggcaaccaatcagatctgataacaaaacctactattatgctgccacattagttgagcttggttggtatgtaccaatggcatcatctcttttcatattattctgtcgctgacatgcagttttagtctccaagccttgtcactgaacatcctctggcttgtgacgctgcccagtcgattcgctcctggatgcaagagtctggcttcaatgccatcaagagttccagatcaaggcctagtagggaccgcctgtggtggtgggcaattatccggttagaaccaaccgttacgtattgcgtgtataattgcctagtagtagcttagttagcttttccaaaccggttgtcgccggtttattccctggtgtagtagctagtgccagtttctgtcacctctacactaacttttgtcacttccgcctggagggctttacacttgaacgatgaccaccaatgaccttttttgccaaaggtattcctggtacccatgcgagatacggagctacatgatgtgctcgtgcagatgatatttatgtaatgacacgtccggtgtggtgagagagttcacccgtatggtcctgcagaacttttgctatagcccattgtggaatggcttggacgcaaagaaagtgacatcttgccagatgaatccgccaatatcatgattagatcttggccatgtcagtagaaaatggtggtttatttatatatgcgtgaattgagcaatattggtgtgcacaataagaaaatctccgatccatctgcgtatttccatcactagtagtatcatgaccttgaatg

SEQ ID NO: 4324 - DNA, 1258 bp, Spizellomyces punctatus
  source 1..1258: mol_type = other DNA
aactcgcacgcaatgaagtcgaaatggatgctgctcgggtaatttttgtccttgactggatgatctatgaaaggtatgacggtgaactccccaaaaccatctgtcgataaactggatgagtcagtggaactcacgagtagaatgtatggtatgtgtccaatagcattgcaccaagcccagtccacgtaagttctctcaggtgcagtttgatagaatcatgatcgacgttgcaaaccccttataggtatacataggccaattagtcgaactgtcggtaagagtataggacgtgcaatcctataccagacgacaatggttcccgagatcgggtgatcgtggaatccacaagttctggcagagcggttgggttgagccgatactcaatgatatcatgcgcatcaatgtcctcttcaaatgcactgcacatatgcatatggatacaaaatggtatattagtgtgaagataaagaccggttctcgtcatttcataaaactaacctggtaaacgattgcccttcaagatattccccaacaatttgcctcttgatccatcgaccacggaggtactgaggatcaatcgcgaaagcttctttgaggtactttaggcaggatccgtagtcaccaatctcgtagagtgcctgcagcaagtctaaattagccaacatcattcgtctggagagcgcatcccatgaacttacattgatgaccccatccaagcatttgaagcgacaggcggatatatctgcccgttgcaaaccagccatataggcatggcatgaggtatcccaggactttgcgcgcgccgctacactcccaattctgcaccaaagtgagacgtcggtgggatcgatctttgctgcctatgatactcatcatcaatgatgcattcaaacaaaaatcaggcgaaacagtcaaatgtcacacctgctcaaaatgaaaaagcgcttgctcccaatttccttcctgttctaataacgcagcgtagttcttgtacacaacatactgtagtgcatgtgctggagaactgtgggcacccgacgcctaaataaaagacaacaaacatatcaagtaatgtttcgaacggactttcccatttctttccgcaccgcaggaagtttgtcttttagtacatcccaacttaagagctcttcaaaggacgtcttggcttctgctttccttcccctttgtaagagtaagagcgttcggttgtatgtgtcaagagctcgttccaccttttgaaccagcgcgcctgttttta

SEQ ID NO: 4325 - protein, 1851 aa, Spizellomyces punctatus
MIRFAVLNPLVEVERDIPKEIKVERALDTYNRTLLLLQRGRKAEAKTSFEELLSWDVLKDKLPAASGAHSSPAHALQYVVYKNYAALLEQEGNWEQALFHFEQAAKIDPTDVSLWCRIGSVAARAKSWDTSCHAYMAGLQRADISACRFKCLDGVINALYEIGDYGSCLKYLKEAFAIDPQYLRGRWIKRQIVGEYLEGQSFTSAFEEDIDAHDIIEYRLNPTALPELVDSTITRSREPLSSGVCNVDHDSIKLHLRELTWTGLGAMLLDTYHTFYSSSSQGQKLPEQHPFRLHCVRVHIAVDTGKDGVDASECQESDAIEVIIKEEGTNVPHEHENIAPGPDEQVTNERKRKLTDGDDSRRISKRVRDRIEQEQQQKATEEIDITEVIDPWLPDGFSIGLENTDQNLVTDVPSFLSTFCSKILSPTTGADLRRKSKSIRKGRKGSLVPAADLMSTPTSSAAFGPNALKSFVDSVNLHNSGLIDTIRFFVTWVILGQVKPDRDFQRHFMDTQWPAGLRSIVPSLLRILEKHNAGVMFWRNAYPSAFYLHDGDSGRCREGEASGAILELLLSLSEILCDAWGSQQEGSPSTSMYDWIHDDCSDGEGEDGNPLHPHSFPQILHRIMDSLVDVLGIIDEDRDQDSLSFVRYLWLKARIHEYRHEYDMAAQTYKQCGEALGCHNFEGFSVSLKNCITDNEISQKSLEWKRLALEARQYVLEADAQFAQTNYEAVIERLKPVLLEAAVASGLSPCDTIMPDDSREASERQEATQIARKFVFYDCGFGKRYQLFDFLRQAFLHVNDPQSAFACTAHLLVDAVRNSSAASDFELHLERLSTLLGDVITYLQTSSMRTEWVQLLEAYQGHASGTEPARNLFQNFLLGVFLCVRMCWVAMRHYKELPTLSRRSAIAHRIKALNIFVVRSWILLYYVVQALHSSPTRMALDSKEEKKKTQTPTEENVPSTTPMDLDAKNALQQENIVDREATNDSVTDVTVEGIDQLADLLIVAHRELGELSLCGLDNGAFLRLILQHIGKASRDSYQAELYQCYHCLYGIKVEHDSDIEDHHTITLPFEREAASEVFSTVSHYVLTKLALRGNRGIPADIKQCLDKVTEVYSEPPWNNARVAVNKETIDRLLERPIDVSDMAPDRSALATVTFTEGERKKISDIYFTLYYLQGKIMWTQYKTRSLAQTVDFHKMIAPLKGATVQYLFNLYLNPRRCDSWISLAQCYSSLANEHLGRNAITIVDNFGKIRLWQQKAYHCYVQASHLARSSTASDLGTTLWGDFGYLCHAIATKPMAGAALSSYLLKIRDLWSRRWSESKRSSPNSVEVESHLAAGVGQIKSTEDHGADARKAPMLQLAAYCFRKAAALEKTDWRYPFMLANIYAKLRKNPAVIIKLYRRAVALVPEEWVTKEQERILDPMIKLAGYLSKALHQGIIQPEEALAALTDLPDSTGSLPGSPVRRNSSTPGTDISLPTWKCSATNTEMDEARAQAFERICIVLIRMKVIDKKKWQHKPRSKLAWIYYHVYRDTERAKGELSALFRKDDKSKGFVNFWKPEFERPGKHFIWVHKYTMFMIDLLKETSDIDGLRRICRKVRKADDVLLWPDKIWKHAYSSCFEALVATVKGERSTPLSGTMSKQEFDERAPEVEERMFAAADPKPPRLVNMLCAFDLKKLDEGFMDEEELNLLLVDIYSSLFSEFSGKSKHSERSQDDIMGHASMQVETTKDGTTSAADETVPAGGVQLNGDGLVDTTISGSPSGNPVETAPHTQALEKVKFSHVLQRVLSVCKNPPQIRQEAPPQISATSGDVIAQGATSPPNANLLITVDASSPGTVPNETESAIDAPVPVDED

SEQ ID NO: 4326 - DNA, 531 bp, Spizellomyces punctatus
  source 1..531: mol_type = other DNA
tgcatccccaaagtcaatgatatgggtaggtacccagttgtttctttgggaggtttgatcgagtttccagtgtccgataatgtttccagcagtcaggtccccatgaaggagatttgcacttggaaacccgaggtcagacacgttgggggatatcgctggtaaagcttgttggatatagtcttccagggtactgatcaaagcggatgggaggtgcccccatcgggtgtgatctcttctcgcggctttgatccttttgcgcaggtatactgtccaatcccgggacgtggtatcctcaccctgaaggataatcttactttgccggacgggcgtgcgatgtaattctcgtaaaacggttccaatccagtttgtcaagttaatccaatcaccgggggtaaatagatttgcagactcccccattgcatgtgactcttcagaacctacgtgcgtttggatgccatatggccaaggccacgatgatgggcctggtttgaaaagcatgccgtgagcgaccatctgtggacagacagcatg

SEQ ID NO: 4327 - DNA, 1444 bp, Spizellomyces punctatus
  source 1..1444: mol_type = other DNA
gatttgttttcaagtcgtttgaattccacatggagggtacaacctttatctcttttgggatatcccgctccacctccaccaaggggttaagaaccgcaaagcgtatctaaagataggtgggtcctcaatcatcgtttccaagaggccgtcaaacttattgataacataccatgttggcaaatcccacgttcttgggttctctaagctcacaagacagctgtgggactgcgtgctgggcggacaatggtcccagatcttgctgagatagtgtgcaattgttaatgccagcaaagcacgggtggacagtcctccgctgggtgacgcagaatggggcttggcgatcattgcctaatcatagtgtggaggtgattgaaaatggcactaagactcattgttatccggataatccggttaatcttatcgcataatcagaaccccctctatcgctcagattggtgtggcatgcagcggtgtggcatgcatgtaatgtttttttttttttaaactgcggtgaggcgcatgccaaaggtctataaaaaggggaccttctccctcttccctctttcctctttacccatcctcgactctaagcatctgcccaacaaatctcagtccaccatgagaatactgctctggtgccgaggacctcgaccgcccgacagcaaccgtgatcagaaccagcagcaaccaatcggatctgataacaaagctgctattatgctgccacacttgttgagcttggttggtatgtattgatggcatttgtcattctgtcatcaggtcatctggctaacatgcagtttttagtctccaagccttcgttactgaacatcctctggcttgtgacgctgcccagtcgattcgctcctggatgcaagagtctggcttcaatgccatcaagagttccagatcaaggcctagtagggaccgcgtgtggtggtgggcaattatccggttagaacaaccgttacgtattgcgtgtataattgcctagtagtagcttagttggcttttccgaaccggttgtcgccggtttattcgctggtgtagtagctagtgccagtttctgtcacctctacactatttatactcgcaagttggacagcagacgttgtcgacaatgtttggcctgagacgtgaatataggaataaattatagttctccaaacacttttacttcaaactcatgccaattatctatcccatcggggatgcccgcattccctttaattcctttaatacccgcttcataactccaaagaagaacgtacgcacacattctctctctaatccagctccactttgatctccagctactgcatcctaaataaatatccaaaagtctatgcagtaatgatacctggcatcgtaatgtcgtcacatacaaaaacgccatgtcccacaaggggtccagtcggatgtcgctgtcggaaggagcaagaaa

SEQ ID NO: 4328 - protein, 1234 aa, Spizellomyces punctatus
MKTPGLRKGHEPHARIQKQIHAEVLSLHTSLSPYALNPVVMSGCRSSPNVSILHHHAEQRECGTLPRSQSKESSPLQSVSSMDLSICKFLDEHILFKDLHDEDFLMTLANSMQTRVYYDNSYVIRQGEVGRALFFVFRGDIEVVSEDGETVINVMTEKSFFGEIGVLFSVPRTASCRARGRCVVLTLTRESLKMAIQRHPEVATSIRYIAEERFASYMKQRESSMLVEFGEELKLGMTQNDLKKIPAFRNCEVGFLHMLALSLCPLQYRHGDRIIRKDDIAREMYFVVRGTAEVFSEEDGQTFAEFHPGSFFGEVGIFFDVRRTASVRCTSNQMAVFKLAKNDLDTLLKQYPEVNQKIQEEATLRFKFNEEREKSKLNKRQAMQLELEVVRERLKNVPLFKDGSLAFFHELVLVLKLHVYPPGSVIIRKDEVARSMFFVMDGTVQVVSEDGKSIYAEMGANAFFGEVALFYEINRTATVRSKSQTTLYELSKDALTHVLGQHPTLRDAMQARAEENYRLFQKRTRAVNQLSESSLPEAYDIDATAARLKKVPIFQNCENGFLRTVALTTSVCARKAGELIVHKGEMSAEMFFIVHGKVQIISEDGSTVYDSVKEGGFFGEIGLLRGIPRTASVRVASKSCGMMILTAEALQKVFQQYPESYQNIVLEADKRFRLIEQRKLSTEGALHADVDTDTIQKKAREIWDTAVDSVKADIKEKAKTKARASDRDESQPQQLRGVRRFLRRGSKVANESLPVTNENESCPPGQADQSLLIEEQGNVPSGHEKTNDVPKTGRRWITKLFQGLKSSSSKRRERGAKVAPEGPSSRRGSDASYISGASTIVQCSLSTTEVQSIADLEERALRIIFSCLNPLERLKMRLMCKRWNELLRRPIQWTTLDFSPVFSTITHKTLTSFWELTGDHLTGLCLETCWRVTDRDLETLAALCPNIYYLSLSNSWRFTDKGLGYLTRNLTRVVEADLSYCGQLKGSGFARHKWSKLKRLDLSYCRSFGDEQLEKILSGTSEITHLQLRRCTKMTDLTMFHVVRYCRHIRYLDLSDCEKLTDRCLKWIGSTSFDLTTLILSFCKRLTNHGLRELRMGSQRLEHLDFSHCEHLTDDAIKSLTENISNLQYISLRFCRGITNRVASYLGESAPRLKSVDFTGCPEVTIVARDMLKSWIPGVHVVLDSPRPLPEIDRRATEVQIYEVFLSGPRDQMRKRESRRIRRAATPRPLSIVR

SEQ ID NO: 4329 - DNA, 1507 bp, Spizellomyces punctatus
  source 1..1507: mol_type = other DNA
gacgtggatcgaaggttgcgaatgagagcctgccagtaacaaacgaaaacgaatcgtgtcctccaggacaagcagaccaatcccttttgattgaagaacaaggaaacgtaccttcagggcatgaaaagacaaatgatgtccccaagacggtgaggcgaagatgtgcgcgattctctaccagagtcattcatcaagtggttaacggaatgctattacttagggccgtcgctggattaccaagctttttcaagggttaaagtcgagctcatccaaacgcagggaacgtggagcaaaagtcgctcctgaagggccgtcaagtcgaaggggaagcgacgccagctatattagcggagcctcaactatagttcaatgctctctcagtaccacggaagtgcaaagtatcgctgatttggaggaacgggcattgcgcataatcttttcatgcctgaacccattagagcgactcaaaatgcgtctaatgtgcaagcggtggaatgagcttctacgtcgtccaatccaatggactaccttggacttttccccagttttttcaacaatcacccataaaactcttaccagcttttgggagctcacaggggatcatctcactgggctttgtctcgagacgtgctggagggttacagatcgggatctggaaactctggcggcactgtgtccgaacatctactacctttcattgtctaattcttggagattcactgacaaaggcctgggctatcttacccggaaccttactcgagttgttgaggccgatctcagttactgtggacaactaaagggctcggggtttgcacgtcacaaatggtccaagttgaaaagattggacttgagctactgcaggtcttttggggacgagcagctggaaaagatactgtcggggaccagtgaaattactcacctgcaactacggagatgcacaaagatgactgatttgactatgtttcatgtagtccgatactgcaggtacttaccccgaactttttcatgctaaccatggtcttgcctgactaactaggactgcaccattaccttctaggcatatccgctatcttgacctctctgattgcgaaaaacttactgatcgttgtttgaagtggattgggtctaccagcttcgatctcactaccttgattctcagcttctgcaaacgtcttacgaatcacggtctccgggagctgcgcatgggaagccagcgccttgagcacctcgatttttcacattgtgaacatcttacggatgatgcaatcaagtccctcaccgaaaatatctcgaacttgcagtatatctccctgcgattctgtagaggaatcaccaatagggtagcatcatatcttggcgagtcagcaccacgactgaaatcagtcgacttcactgggtgccctgaggtgaccatcgtcgccagagacatgttaaaatcatggataccgggagtccatgttgtgctcgattctccaaggccattaccagagatagatcggcgtgcgac

SEQ ID NO: 4330 - DNA, 531 bp, Spizellomyces punctatus
  source 1..531: mol_type = other DNA
aggccgaagcacctcatgatttagctgacgtcttattaaaacaatagacatgctgcattatattcattcgaacagcatccggatctatcactaatatgaatcccgctacgatctaccgtaatactatcgcaagctaagtgttcacctctctgccccaagtctgcaaggcaaaaattcgagcgatgggtgcacatcttttcttgatttgcaagtcagcccgtcgctttcgacatttcaaagctatcggtgacatccatcaacttcggtgaccgtgccatcggctcatccccgaacaaagctgaagcaactagcccggccgccgatcagatctcttgcgccatggcttagaaagttactcaagaggaccggtgaaactttggaatcattagtgcaagaggatcagctcgccatcgctggcaagaaccttttcaatcaccccaattaggccatttagaaaacaagtgaacttgcaggagcaggaggccgccgagtatagaaaatgacgtgatggtgagtcgtttcattgctggt

SEQ ID NO: 4331 - DNA, 1444 bp, Spizellomyces punctatus
  source 1..1444: mol_type = other DNA
cgaggttcagatatatgaagtatttctgagcggtcctcgggatcaaatgcgaaaaagggaaagtagacgaatacgtcgagccgctacacctaggcccttgagtattgtgcgataacgaagaggtactgcgctcccttatgatgagcttgttataccatatcatgtacatgaactctacatctgctgcattgtcaataatatatgaagcaatatcagctttcatacataaaccaagccatggttcactaatcatattttctactacatcaagttggatctagtcctaatcttgttgtaacagtgccttactgggagagacagatcaagatcattgatcattatctcatacatagtgtggaggtgattgaaaatggcactaggacccattattatccggattaatccggttaatcatatcgcataatcagaacccccatctattgctcaaagcggtgaggaggcatggatgctaatgttctccaaactgcggtgtggcatgcatgtaatgtttttttttttaaattgcggtgaggcgcatgtggaaggtctataaaagggcggccttagctgtctcttccctctttcctctttacccatcctcgactcacaagcatctgcccaactctcatcaatcatgagaacgccgatgtggtggtgccgaggacctcgaccgcccgacagcaaccgtgatcagaaccagtggcaaccaatcggatccgataacaaaacctactattatgctgccacattagttgagcttggttggtatgtatcaatggcatttcttgtcatcgggtcatcttctgacatgcagtttttagtctccaagccttgtcactgaacatcctccagcttgcgagtctccccaatgttgcgaagactctggcttcaatgccatcaagagttccagatcaaggcctagtagggaccgcgtgtggtggtgggcaattatccggttaggacaaccgttacgtattgcgtgtataattgcctagtagtagttagttaggttttccgaaccagttgtcgctggtttattccctggtgtagtagctagtgccagtttctgtcacctctacactatcaatgatcaatggttgcgggatagaatgcgcaacagcaatagtttacaatacttttacggcaattgctaacattctatgctttgcatacctttactccccaattcttgccgcgaaagagccgcttttactgcttggaacccaggcctcattgcagatcacgaatagaaatgtagcagttttctacttagttgattaaagaccatctagttcgccacgatagggtgtggttcaggcgaagaagaatggaactgcaccaatagattacgtcggatgtagtggatggcttggctcggtttctacgtggacaacagtctaagaagcagtctatcgccatgtggaggttggaaggttggaaggca

SEQ ID NO: 4332 - protein, 325 aa, Spizellomyces punctatus
MAEYKGAGSEASRAAMLENQRKMMMADFQNQKDRIAKEKTVHIGADKFVAQNDWVDSELKRQTIGLVQLEDFQRIRESLDQKRREDIEKEQAALLKQKRKKKKEKIKLSFDIDGEEGEDEETNKEETDEKPKKKIKKDPAVDTSFLPDREREEEERKERERLKEEWLEKQERTKKEKILITYSYWDGTGHRKQVECKKGDTIGQFLENCRQQWHELRGVNVDNLMYVKEDLIIPHHYTFYDFIVNKTRGKSGPLFSFDVHDDVRLVNDATIETEESHAGKILERAWYEKNKHIFPASRWEVFDPQKSYGAYTIKDKNKEREKEGR

SEQ ID NO: 4333 - DNA, 896 bp, Spizellomyces punctatus
  source 1..896: mol_type = other DNA
tcctcttgtatgatgcattgcacaggaaaaaacagttcacataggcgcagataaatttgttgcccagaacgattgggtggatagcgagctgaaacggcaaactatcgggttggttcaacttgaagacttccagaggattagagagagcttggatcaaaagcgacgagaggacattgagaaggagcaagcagctctgtaagtacgggtgacttccaagttactactgcacatattctgactatgtcgtgatgcactgatagactgaagcaaaaacgcaaaaagaaaaaggagaagattaaactgtcttttgatatagacggtgaggaaggtgaagatgaagaaacgaacaaggaaggtaagcagcgagggctggagaatatgcggctgcccgatgatgatgatcgtaatgtatcgtattatttccttgatcatgtgcaatctttgcacttgacatgagaaccttaatcttctcactgagggccgccgtgcgaaatccttattttcaatcccagattcacctttgatgctaacaaggaatttccgtccatccagagacagatgaaaaaccaaagaagaaaataaagaaagatcctgctgtcgatactagctttctgccggacagagagcgggaagaggaggagaggaaagagagggaaaggctgaaagaggaatggctcgaaaagcaagaacggaccaaaagtatgcccggaacactgtactttgtttccgaaacttttgtctcacatcgtcttcagaggagaaaattctgataacgtacagttattgggatggcacaggtcatcggaaacaggttgaatgcaagaagggtgatacgattgggcagttcctagaaaactgtcgtcagcagtggcatgagcttcggggagtcaatgttg

SEQ ID NO: 4334 - DNA, 874 bp, Spizellomyces punctatus
  source 1..874: mol_type = other DNA
cagaggtggtgcgtcttctgcacgccaacctggacaaaaagcacgcaggagcgcctcccgttattcctccagttgtgcgcaaccgcattgcggcgtttgaaggaccggaagtggggaaaattcaaaagaaacttgaaccaaagattacccaaaacatgctcaagcctcctatgacaccctcacgcagagcggctatcgcagccagaagggtgaccagagctacttttgctgaattgaaaaatggttttgaggaagacggtgatggacatttggtacgtcccgagtggcctgatgtaaaggcaaggaaggctcttttcgaaccgatttctggggaaatcaacggacaggacaacgtccctggtcgcaaggttccaaggactcctacgcgcaaaagccgccgcttaactacgggaagcatgtccgatgattttgcacgcaagaacaacgaagagttcacaggcgcgcttctctcggtggaaaacacgttgaaatccgaggccattacatacccttctccatttgatgatgtcccagctgctagtgatgatatgaaggaaactcaagatgataatgtcccaacgactccatcaaaatccaaatcgactgtagctcggtcggcgcgtaaacccaagaacgacgaatcgtctaaagaaccttccgacgatgcaatcacgccgccaaagatacacgctggagcggaagaaacgatggctacaccgcgcactccgactagatccgctgctcgagggtcagcccgcaagccaaaacgtaacgatgacatggatcagtcgacttctgacgagcaaaaacagctggcagcaacgggaagcccatcacgtcgccaggatgctgttgatcagctgaaaaaggacga

SEQ ID NO: 4335 - DNA, 2210 bp, Spizellomyces punctatus
  source 1..2210: mol_type = other DNA
acaacttgatgtacgtcaaggaagatctgatcataccacatgtaagtaggccgcaagtaagacttgcgtattgggcacgaattctaactgctattgcgtttttttttacgggcagcactatacattttatgacttcatagtgaacaaaacccgtggaaagtctgggccgctattctcctttgacgtgcatgatgatgtgcggcttgtgaacgatgcgaccattgagactgaggaggtgaggtcatctcggcgacatatcaatgaacaacatttcttattcttacttccgttctcagtcacatgcgggtaaaattctcgaacgcgcctggtatgaaaagaataagcacatctttcccgccagccggtgggaagtgtttgacccacaaaaaagctacggggcgtacacaatcaaggataaaaacaaagaacgagagaaggagggccgatagatagttggtgctttgttactccgttgaatggccatttgcaatactctgtttacttttctgttcatcatgggcacctgctttgaagcatctgaattcctgtccacatgtggtcactcattgtgttgaggaatgatgatttactttgtcctttacgacgatatcattgccgggaagaaagcctggcgagcagtgtgcatgtgacagctcaccagaatacctgttttttaatgatgaattcgaattattgcagagatgatttgcgagcgaaattaggatggtcccctaacatggtttcaggcgacaagtcccttccaagatggatataacttacgcttaactaacatgtatgctaagctcggtttgctcagtttgagatctagagcttagtcgagtgcatattgtggacgtgattgaaaatggcactaggacccattattatccggctcaatccggttaatcatatcgcataatcagaacccccatctatcgctcaaatcggtgaggcatgcatgctaatgttctccaaactgcagtgtggcatgctaatgtatttttttctttttcaaactgtggtgaggcgcatgctgaaggtctataaaaggggggccttttgctgtctctccccttcctcaccagttcctcgactctcaaatcatctgcacaactcttctcatcatgactctcaagtccaaccatgagaatgccgatgtggtggtgccgaggacctcgaccgcccaacagcaaccatgatcagaaccagtggcaaccaattggatccgataacaaaacctactattatgctgccacatttgttgagcttggttggtatgtactgatggcatttcttttcattctgtcattctgttgctgacatgcatttttttgtaatctccaagccttgtcactgaaaatcctccagcttgtgacgctgcccagtcgattcgctcctggatgcaagagtctggcttcaatgccatcaagagttctggatcaaggcctagtagggaccgtgtgtggtggtgggcaattatccggttagaacaacagttacgtattgcgtgtataattgcctagtagtagttagttagcttttccgaaccagttgtcgctggtttattccctggtgtagtagctagtgccagtttctgtcacctctacactaacatatctatcatttcgtgatgagagtaaatgacggctgatacatgcttgcaacccgttgcatcttggatggcattgtacgattaatacgacattgccaacaaaaccttttataattggtgatgctcttcaaaaagcttcctattgcgcaatgcaaaacgtggaacgctactgtacttggcccccttcggactcatccaaaaatggcaattgaacagtcagttcgcgtacatgtccgtaaggcgcgtcattcggacacctcaccgacgtttcctttcacacttcctccgatccaacttttttttttttggtcgagcaacaggcttgctttccgcatcatatcatacttgtcgctgaaacttgactttgtctgcattacctgagaaacacatcaaacgacacatgccgtccgacgaggtaggttctttgcaattagtgtgcctgaaacacgaagctctttcctgatcggcgtgactctatccgacgtctagcaaaactcgcacggcactggccaatcactgccgaagaagcagcaagtctttaatgcagcccaacaaaatgtcggccgtccgcgaggaatgcgaggtggaaagtcagttt

SEQ ID NO: 4336 - protein, 411 aa, Spizellomyces punctatus
MFNCSVEYRDSKKDITFPHTPSFNELRECVCKAHSIADRNSIELRLAVDDETVLQSDEDVNRLLNGDITEVSLVVMDQEGDESGDEFVVVSKDVVEDACIVTATDAVGSEHDPTAPDSGDKAVLSNILRAPLLVDADEGECEKCELVAEEIPAEPHIGERGATEAIRDALSSNEDEHEGTSAKHNQSDEASAGISGTSEVKESSNSFDSFLCEVQPLIDTLLTKLESNPQHLSRLQMHMNSTLANRNWGITVLPNASPQVRPGSSASNRTSTSEMQTHPVVKWNSVICDGCERRHFTGPRYKCLSCPDYDLCGRCFENRRDVHDTAHGFEELKNVKDVWVGVSCDGCGRRGFAGKRYKCSECRHYDLCENCYSSLRTSTLHVPWHTFTALDPTSYPRSTRPLTTRYDEIFI

SEQ ID NO: 4337 - DNA, 780 bp, Spizellomyces punctatus
  source 1..780: mol_type = other DNA
cagaaccgcatattggggagcgtggagcgacggaagcgataagggatgcactatccagtaatgaagacgagcacgagggcacatctgcaaagcataatcaatctgacgaggcttcggccgggatatcaggaaccagcgaggtcaaggaatcatctaattcttttgacagcttcctctgcgaggttcagcctttgatcgacactttgctaaccaaactggaatctaaccctcaacatctttcgcgcctacaaatgcacatgaactcgacactggcaaaccgaaactggggaattactgttcttccaaatgcatcgccgcaagtacgaccaggatcgtctgcatccaatcggacatcgacatccgaaatgcagacccatccagtggtaaagtggaattctgtaatctgtgatggctgtgaaaggcgtcactttacaggacctcgatacaaatgcttaagctgtccggactatgacctctgtggccgctgtttcgaaaacagacgagacgtgcacgatactgctcatggctttgaagaactgaaaaatgtcaaggatgtatgggttggagtatcatgtgatggttgcggaagacgtgggtttgcgggaaagaggtacaaatgctcagaatgccgacactatggtaatgcttcaactctgcacagattttgagtgttgtaattagtattaaccacatttatgtcgttgtgcagatctctgcgaaaattgctatagttctctccgcacttctaccctccacgtcccgtggcacacgttcacagct

SEQ ID NO: 4338 - protein, 473 aa, Spizellomyces punctatus
MLRSFLGSLWRPVKGLGHPLQGRLARPWEATEVSVSQGYSSSGIPSPSSSRLLQVARRTVLHQLFLRAGVTQKAAPQLPLLPYSHLLDALRSVFPGIARKMATQNITSTAWALPKNTSAFRGRFYTGRGPIGQAPPFGRIFPAQNTMFGAYSTRGFTQGSRQFGGRRNFTTGFGQQTFQSHGPSVSNSFAGFKVLPGAVTEEMKDKNGMGDDLKARLRARVTRTPKRRLVPKAVKSIRPARLGVLLKRAVDVEPAGLGAAVENTGTAVVVRTAKKVVTKRSPVQVNPASSKAVSVSMSIFLYGPPAWEMDSISRAGSQNLTVALITEIRSLARLHKDHLTATAIILEKLLQSGLRDLHVREEEGGTYELIVAFPTGLSLTDVVDYLLVMGIDPCSPHFKLEEHQLKSDMPRRQEPAMNGVNFPWPAAHSCTSSLDSHHVSDNLPADASAFLSMVESLISASEQFGSGSRGTVK

SEQ ID NO: 4339 - DNA, 612 bp, Spizellomyces punctatus
  source 1..612: mol_type = other DNA
ttgttacagaaagccgcccctcagttacctcttcttccatacagtcaccttcttgatgcgcttcggtccgtattcccagggattgctcgaaaaatggcaactcagaatattacttcaactgcatgggcattgccgaagaacacatcagccttccgaggcaggttctatactggaaggggtccaattggccaagctccacctttcggccgtattttcccggcgcaaaacaccatgtttggcgcttacagtactcgaggattcactcaaggatccagacagtttggcggtcggaggaatttcaccactggatttggccagcaaacttttcaaagtcatgggccttctgtgtcgaactcatttgctggcttcaaagtgttacctggtgctgtgacagaggagatgaaggacaagaatgggatgggtgatgatttgaaagctaggttacgggcacgtgtgaccaggactccaaaaaggagactggttccaaaggcggtgaagtctattcgccctgcccgcttgggtgtcttgttgaagcgcgctgtggacgttgaacccgctggtctgggtgcggctgtagagaacactggcactgccgttgtagtacgtactgca

SEQ ID NO: 4340 - DNA, 1427 bp, Spizellomyces punctatus
  source 1..1427: mol_type = other DNA
cttgatcccacctcataccctagatctacgcgcccgttgacgacacggtatgatgagatattcatctaagctgtgtagctaggggaggccaaaagcgggcatattgggagattgcattgctgtaaccagtttaacggttgcatggttcctcatattttggttttagcatctgtacaggggatgtagctagttagcatctcatgtaggaattctgtgtatattgatttcagtgtatatctgttgtttggtgtccatgctctggatcaaaaaatatcacttattgcatggtacttttcctgtccactatagtgtggaggtcattgaaaatggcactaagacccattattatccggattaatccggttagtcatatcgcataatcagcaccccctctatcgctcaaaacggtgaggcatgctaatgtaatgttttttttttaaactgcggtgaggcgcatgccaaaggtccataaaaggggggccttctgtctcttccctcttgtttctttatccctcaactcaaagcatctgtgcaactcttctcatcgcgactgtcggtcgaatcatgagaatacagatgtggtggtgtcgaggacctcgaccgcccgacagcaaccgtgatcagaaccagcggcaaccaatcggatccgataacaaaacctactattatactgccacattagttgagcttggttggtatgtatcgatgtcatttcttgcatttcttgtcatcgggtcatcttctgacatgcagtttttagtctccaagccttgtcactgaagatcctccagcttgcgagtctccccaatgttgcgaagactctggcttcaatggcatcaagagttctggatcaaggcctagtagggaccgcgtgtggtggtgggcaattatccggttagaacaaccgctacgtattacgtgtataattgcctagtagtagttagttagcttttccgaaccggttgtcgccggttcattccctggtgtagtagctagtgccagtttctgtcacctctacactactaaatgttcatggtattttcatctgatcacgggtgtcacgcttacataagcacgggtggcagacgtcaactgcggttcgtgccttctttccaactagcaaagaaggtataatcttgttcaaaccttggtgaaccatgctacgatcctttttgggcagcctttggcggcccgtgaaggggctcgggcatcctctccaaggccgactcgcaaggccgtgggaggcgaccgaggtgtctgttagccaaggctattcttccagcggcattccctctccttcgtcgagtcggctgttgcaggttgctcgtcgtacggttttgcaccagttatttcttcgtgctggagtgacccaggttggtaacttacagcgtttgcaatacagctaaaccaaggactcagtatcttct

SEQ ID NO: 4341 - DNA, 637 bp, Spizellomyces punctatus
  source 1..637: mol_type = other DNA
ctatacctgtgagctggtgctagcactggaacatctgcacaagtataatattgtgtacagagacctaaagccggaggtaagagcaattgtcgcctttcttaaggcagcattcgtcagagacagtcacttttttgatttattgacggtacgattgggcgcatctagaacatcctcctggatagtacaggccacatagcattgacggactttggtctgtgcaaagaaaacctctccttcaatgacacaacaaatacgttctgtggaactgccgagtatctggcgccagaggtcctaacaggacagggttatggcaaagctgttgattggtggtcacttggaatcctcttctatggtacgtgatcaggtcatatgattgttggtgcatgagtaacatatgcatactgcattgaacagaaatgaccacgggtctgcccccgttctattcggaaaacaccaacctcatgtataaaaagattctgcacaatcaactgctattcccaccaggattttcagaaaaggcacaatcattggttcgaggggtaagtccgtgacggcacataaatatcccctatatgcgactaacggcgcaaacatgacagcttcttgaacgtgaccctcgaaaacgattaggaggtgg

SEQ ID NO: 4342 - protein, 86 aa, Spizellomyces punctatus
MENEKGQVVDLYIPRKCSATGRLITAKDHASVQINVADVDASGRLAGTFHTYALSGFVRSMGESDDSINRLATTDGYLKGVWSYQQ

SEQ ID NO: 4343 - DNA, 1007 bp, Spizellomyces punctatus
  source 1..1007: mol_type = other DNA
ggatcggacgaaaccagacagggcgtaggtatggaaagtacccgccagacgtccagaagcatctacatcagccacgttgatttgaaccgatgcgtggtccttggcggtaatgagacgtccggttgcagagcatttgcgaggaatgtagaggtcgacgacctagttgcaaatgtcaatataaacttgcgttgtcccgtccatgtgctgctggcaccgcactcaaaagtccccttgccctcccctcgccctcccccactgcatccccgacgccctacacacctgacccttctcgttctccatgtttgatacaacgagggtgctggaacgaagcgggaagggatcgttcaggtattgccgaaaatgaaaatgtccaaaagatctcgaactagcaaacttcaaaaagaagttgatcacgtgatcgagacgtcatgtggttgccatcatccgccatcggtcccatttccaagacgttttaaaaaaacctcattttgaaagttgctggttaacatctcggaaatttccattgtagagcttcctacagccccactaaacagttttgcaaaacgggcccgctatcaaccgagtttcaatcccatcgattttgaaaatctgtaggcttttcctatggagggaaccgggtttcgggacgattcctccagaacttttgattctggctcaagcacttggcccagccatggccattctcaccattcccatcattcctcgtcttcctttgtaccgggcctgttgcttggtgctctaggaggggcttttggtgcatcatggtggcgatctaacaatcccgcagtccctcctccatctggatactttccacaacatccacaacaacctttattcccaaacgacggtcgaacgtattatcctgccccgtctcctgttagacctcagccccagcatccttactacccgcaatactcccccgtcccgccccgtccgtccacgccccaaaatgtgccctttttgccagaccccgtctttgtcatgcc

SEQ ID NO: 4344 - DNA, 1672 bp, Spizellomyces punctatus
  source 1..1672: mol_type = other DNA
cccggaagacgctgccgaaattcgaagacaccccttcttttccaatatcgaatgggataaactactcaaaaagcaagttacacctccctttaaaccaaaggtcgagtccgaaacggatacatcaaactttgatcctgcattcacggattcaatcccggtcgactcgttgccgagcaattcagcgcctctgtcggaaacggttcaagagaatttcagagggtttacatatatcgaggagggctcgcttgcagccagcgcaaatgcgcatccaacgtattatatgtcatcagtggctgagtaggggttttaagtgggacaatttgtatatgtattgatctgtgtttactgatcgggctattttattatgaatctcatttattcactcaaatgtcccaacttttgtttttggcactcgaatattggcccttgcggtggggatgattggaaatgatgctgattgttgcgcttttcatccagacatccaaacaacgcaagacgttgacatagtgtggaggtgattgaacatggcactaggacccagtattatttggatccatccggttaaccatctcgcataatcagcacccccatctattgctcaaagcggtgtggcatgcatgtaatgttttttttttaaactgcagtgaggcgcatgctgaaggtctataaaaggggagcctttgctctctctccccttcctcaccagttcctcgactcacaagcatctgcccaactctcatcaatcatgagaacgccgatgtggtggtgtcgaggaccttgactgcccgacagcaaccgtgatcagaaccagcggcaaccaatcggatccaataacaaaacctactattatgctgccacattagttgagcttggttggtatgtatcaatggcatttcttgcatttcttgtcatcgggtcatcttctgacatgcagtttttagtctccaagccttgtcactgaagatcctccagcttgcgagtctccccaatgttgcgaagactctggcttcaatgccatcaagagttctggatcaaggcctagtagggaccgcgtgtggtggtgggcaattatccggttagaaccaaccgttacgtattgcgtgtataattgcctagtagtagcttagtttgcttttccgaaccagttatcgctggtttattccctggtgtagtagctagtgccagtttctgtcacctctacactaaatatcgcatctatcaaatgaaacatgccggtgggcagccggtacatttctcactttcaaaaaagtacagaagacgcaagatattcccaagttgcaaacagattcagtaatcatgcatccaaaagaacacacatgctgagcctggatcgagttggggtaaggggccattgagccttggaattggttacaattcgtgattggacattgattgccctcgatggtcctcaaatcctcattatatcgatttttaaaaagttttattaggtcgatcagagtagagggtgaaagatacagttttgcattctccagataaacaggtcatggagagttctactgttggtaactccacacactagcaacagcgcatttaataaacaaatcgcacctaaaaagtcaatcctgacttaccccttgaggtacccgtcagtggtcgccaatcggttgatggagtcatcagattcacccat

SEQ ID NO: 4345 - protein, 372 aa, Spizellomyces punctatus
MGPSAIFNHLHTMLYAVIHEITTVASEMPPKTKRSNSGTPHSEVKIVGEVQVDSSTPTGDKRKLDVVETVSQDAATGEDREEQVNTPRRSMRSKVTAVAASKTSSHVNTPRAKRVKLDAQSIEYLLTNRKSKLGKSGLDLKKIFSFEVFQMLSPEDQDELTQLVPSVDRANARGIHDPPLTERFFKYSTHLRESIGVFQDMLAGGFYEPAGQEQMVQEVEDTKKDYDSWKEQNYEEVWGDHLDQEVSEEIASIAKTITLKEMCEQDILRSGDEFVYKRSFGKIGVTVEKAVKIISVDGTLRVQSGNATWADIEAPTRLETLILDQDKRVSKNKRPNGNAWKSIRLRRNGKDMGKLSEMRNDLAISGYGKGIS

SEQ ID NO: 4346 - DNA, 1341 bp, Spizellomyces punctatus
  source 1..1341: mol_type = other DNA
gaaacactccacataaccctgtccggttcgctgatactgtgggtatagttatcgaaaggaagcggccaccagacgctttgggtaagttcgaatcgattcatctgtgtggtaagctctcttacatgtcatcccttaagaccggttgcgttggtattgtgagaattgtaaaaaaattgtgtatgaggaatcctttcattgcgttgacctagggacgcaactcaaacccgtcattgagcggtattatgccagcgaggagttgcgaacctgcaaagaatgtggccatttaaatccaaaaaaataaattacatgttccactcggtgggtgggatgaatcaagcgcagtatctagcccagttcgcagagcaatctgatggggaccatatcgcatctttcatgatataccctttccatatccgctgattgcaagatcattcctcatctcagatagttttcccatatcctttccatttcgtcgcaatcttatgctctgcggtaacggcaatcataatcagctaagatgcggtacagttccacagatttccgagccatggtttaccttccaagcattcccgtttggtcgtttgtttttgctcacgcgcttgtcctggtcgagaatcaatgtttccagtcgtgtgggagcctcaatatcagcccaagttgcgttcccgctttgaacccgaagggttccatcaactgaaataatctaacagatggaacaattaaataccctggggaaggtcgattatttcatgacagatcattgtaaggagattaccttcaccgccttttcaacagtaaccccaatctttccgaaacttcgcttataaacaaactcgtcaccactccgcagaatatcctgttcgcacatttccttcaaggtgatggttttcgcgatgctgtaaaccgagaaaatgctggtatgcaagcacagctagaggtatgtcatcgctcagcctacctggcaatttcttcgctaacttcttgatccaaatggtcgccccatacttcttcgtaattttgttcctgggcacttttttgtttatcgcagcccgagggtaagtcgcgcacactgttttaccttccagctgtcgtagtcttttttggtatcttcgacttcctgcaccatttgttcctgtccagctggctcataaaatccacctgctagcatgtcttgaaatactccaatactttcacgcaaatgcgtactgtatttgaagaatctctccgtcaatggtggatcgtgaatccctctagcattcgcacgatctacgctcggcaccagctgtgtcaattcgtcctgatcttctggcgaaagcatttgaaaaacttcaaagctgaata

SEQ ID NO: 4347 - protein, 638 aa, Spizellomyces punctatus
MWHAARQHERKVNAVMVDHKARAERRAKYYKSKLVDPSQLLRVTGTSCKLYPDAQQFYYHENQDNLLKWQGDEEARIDRFDGRGLLDFVPTVNPGQPIEPAEDDELVEELNFERYRDLVESDRLERVESSVLDRIDEEWNDLLTKQRGDPKQDKQQGSSCTPSAGASIGYTYEEGRVADEPQETPLLQQEDLLSNIEELEDADIAVLNQIAEPYGIDDYYYRMRLVKKEQEAHRADEEAGLRLHNQRKRARGKRQRSKERRTTTHEPISRPAVYNRRASPTYAPYASDIAIPERNREPEIGEGEDSIEFITEFACESVEPEDNGGNHTRSPRSYSRLEDDSEIAYRSPSIASSSSSISARQAENGKPQTVAKKKLTPLERLKQKAQMALEKQSQISFPVCLLTHAQEAGALVAYQFRADEVKQHKKVEEERLQQLDRQSAFREMKSRKEGSTSNQATSVVSTSEIRILSDTLSGSEAIQTRRERSRSPSVKRTRSQSSSVEARSPSRHSRQDRRPRLRERESSLSRSRRYSLSSESRSRSSSSSRSRSRSRWRSRSRSRSRSRSRARSRYNRERKVHKRRGSSNRRDRSSEGRKRRRVKSRFRSGSRHRKHVRSRSGDGRRRKRRESRSQTPPRVRQK

SEQ ID NO: 4348 - DNA, 626 bp, Spizellomyces punctatus
  source 1..626: mol_type = other DNA
cccggacgcgcaacaattctattatcatgaaaatcaggataacttgtaagctacttgttggtcagaaaacacatgtcctgtaccaactacacatgtcctgtaccaactaattgtttgtagattgaaatggcagggggatgaagaagcgcgcattgacaggtttgtgagatcttcagttcaaacccaatgaagttttattgactggactcctagattcgatggacgcgggcttctggactttgtcccgactgttaatccgggccagccaatagaacctgctgaagatgacgaactggtggaagaactcaactttgagcggtacagggatctagtggaaagtgacaggctagagagtaggtttcacgactgtcatccggtacagaatgcctctcacactgctactattaggggttgaaagttctgttctggatcgtattgatgaagaatggaacgatctgttgacaaaacaacggggagacccgaagcaagacaagcagcagggttcttcatgtaccccatccgctggcgcttctattggatatacgtatgaggagggtcgagtagccgatgagccgcaggaaacgcctctgctccagcaggaagatcttttgagcaacattgaagaa

SEQ ID NO: 4349 - DNA, 1598 bp, Spizellomyces punctatus
  source 1..1598: mol_type = other DNA
ttttcttgagaatgcaatggagagactgagcaaaacaaaacgtccagccaacctttgaggacaatttccgtacctttaaatctaacccagatttacctagctttgactttcgatttgtaaggagatattcgatactttgggcatctaactttactctcttcgcgcgcggcgtgttgacgtgactggaggttttggaagcggcaactgctgtgaccttggaccgcatacttcgacgaggagtgttaacttgttcctctctatcttctcctgtggctgcatcttggctcactgtctcaacgacatctagcttgcgtttatcaccggttggggtgctgctgtcaacctgcacctcgccaacgatcttcacttcagaatgcggggttccagagttacttcgctttgttttagggggcatctcggaggccactgtcgttatctcatgaataaccgcataaagcatagtgtggaggtgattgaaaatggcactaggacccattattttccggattaatccggttaaccatatcgcataatcagaaccccctctatcgctcaaagtggtgtggcatgctaatgtaacttttttttaaactgcggtgaggcgcatgccgaaggtctataaaaggggggcctttgctctctctccccttcctcaccagttcctcgactctcaaagcatctgtgcaactcttctcatcgcgactgtcagtctaatcatgagaatacagatgtggtggtgtcgaggacctcgtccgcccgacagcaaccgtgatcagaaccagctgcaaccaatcagatctgataacaaaacctactattatgctgccacattagttgagcttggttggtatgtaccaatggcatcatctcttttcattctgtcattctgtcgctgacatgcagctttagtctccaagccttgtcactgaagatcctccagcttgcgagtctccccaatattgcgaagactctggcttcaatgccatcaagagttctggatcaaggcctagtagggaccgtgtggtggtgggcaattatccggttagaaccaaccgttacgtattgcgtgtataattgcctagtagtagttagatagcttttccgaaccggttgtcgccggtttattccctggtgtagtagctagtgccattttctgtcacctctacactaacaagcggaaagtcattgaacggaggatgggtctgatcgtgctgaggcacgtgaatgtcatttaaaggctgccttcacgtcgatgcgtttgtttaccttcctctccccatatatcaaggtgtgagcaaaaacatagaagaatgtggcatgctgctgtacgtgagggcatttccagctgctttttttagttcttctcgggggcaactgaaatcggctacctattctagaggcaacatgagcgaaaggtgaatgcggttatggttgatcacaaagctagagcggagcggagagcaaagtactacaagtcgaagctcgtcgatccctcacagctacttcgcgtcactgggacatcctgtaagtaccttgtcggaggtgaggtttatacctagggtgccaatgagataactctcgatgccaggcaaactgta

SEQ ID NO: 4350 - DNA, 1114 bp, Spizellomyces punctatus
  source 1..1114: mol_type = other DNA
cttgctctcggtaaatcctctattctgttgggttcagtcatccatatctaggttacctgcaacaattcttcttacccaacagcaagtgaacatgaccaagctctgttcgataagcgctattttccggttcgataactattgctttctccagcaacttggtgcatccgtccagtaccctgtaataaggttcaagcaagccgattagaatgaaccattgacaggagatgataggtagagaacgcacgttgccaggcggtttgacaggcgaataaagggctgagcagtagtataatacagttgcgcattgtgaggctccagcctatctagagtctgagaaaaattattattacacttcatcccaactggccgtccatcagtcaaaatcaatcacctgcttgagcttggcaatgtaagatgcagccattgcatatccaccttctctgcagagctgattgaggcactgggcaatcatcgcatctatgctatcaggcatcaaccctgccaaccgctgtgatgcttcgttgacttgttcccaagcacccatttccagcaatacatacacccgctcgatgtaagctggtatgaaaccaggatagtgtacaatgatttgggatgtgatatctagagcgggagttaattggcgacgatgtcgtcggaggtaatgcaggcgacccatgagagcctgcggttttgaatacactgtaagccgttctattgaggaaaacaaccccacttcactgcacgcggtacctccaaatctttaggtctcttctccaaagcacgatccagccacgtatgtgctttcgcggcgacggaatcttttggtgatgccatgtcgatccatcccatgagcgtcaaagcctcagtagacccggaattcatatcgagcgctttcttgacgttctctttggccaggtcaaggaagccgcagtgccattgaaacattgccgcttgtatatgagcgcggtcggttagagacggtgagttactggcaatcgtcaattttgcctcaagctcttgaattgcttccctgtctgttacatcttaacagaccgccaactttctttgtgaaacaatgacatacgggcgtaccaactagtttacaccgctcgtg

SEQ ID NO: 4351 - protein, 1324 aa, Spizellomyces punctatus
MSADEDLAAINYFCRRKLFHHAYSLCDDRLKRKVGDPLLLFWRAASTVFEGRPTEALRALESVQDKRDFLLAAPIAMIHAHERCKLVDREAIQELEAKLTIASNSPSLTDRAHIQAAMFQWHCGFLDLAKENVKKALDMNSGSTEALTLMGWIDMASPKDSVAAKAHTWLDRALEKRPKDLEALMGRLHYLRRHRRQLTPALDITSQIIVHYPGFIPAYIERVYVLLEMGAWEQVNEASQRLAGLMPDSIDAMIAQCLNQLCREGGYAMAASYIAKLKQTLDRLEPHNAQLYYTTAQPFIRLSNRLATVLDGCTKLLEKAIVIEPENSAYRTELGHVHLLLEDLPRAREAYQHAASLDPHYVKALEGLIRCQLLSGHFDAAEEQLELFNEFQMAMGKSAEMTYLSSVLAWYKYGDARKRLQYLKEAVEIELQLINAMPLSLEYYVQVNPDFLLEMVKDYMEHCPSDPKREGEDVHPIIKIVLDLLEVVCKVNPGSVEAVYHLAKAKFLAGDKASAQLAAARCLKLDNTYPKGYVLMGQIHLYDGHAKQAIQFLEMGLSYNFQVRNIPLFHILKARVQITEGNYDEALATLQTAMSLPGMKEPMREGNRVPRMKRPDHIPSIHERMTLYLELVDVHTKLKHVNEAAKVMQEAVQVFSGMPEQDRLVMAKAELALARGEVDAALNQLATITMDQPYFIEAKRQMADIYLKYKNDKKAYARCYSELVERNPTVESCLLLGDAYMNLQEPEKAIAIYESAMDSSPEASVLASKIGKALVRTHNYSRAISYYESALANESPIGSILRYDLAQLYKKLQRYDDAEKILTEALEHPQTDEISDIELDISCQTLLAQVYRCMQNPKKAVMALQEARDLQMRVLAKEAMAADTRPQRTKLADINYEIAELYSRDLKEVDNALTHYNEAIENDEGHAKSILAVCQIYLSKGEVDSAQLQCSNLLRLDTTNEEATMLMAEIMYRSNSHAEAIFHFRSLLDRIPTHYTALVRLIEVLRRSGKLDEIPKYLKLAEESTVKVNLHPGYHYCKGLHYRYSNSPHEALKEFNFCRRDTEWGERALYHMVEIFLNPDNETTGGEALEGAADTSASGGKKGDSELLAILTADKLLKELPQNPKSLRTQVLECHALMATKQKVEIERALAKFAEILNTERDYVPALLGMAVGYMLLKQPPRARNQLKRIAKMEWTSELADDFERSWILLADIYIQGGKYDLATDLLKRCLSQNRSCAKASEYLGFIMEKEASFKDAADHYEIAWQLDREANPAMGYKLAFNYMKAKKHVEAIDVCHKVLKLYPDYPKMRKEILDKARASLRCP

SEQ ID NO: 4352 - protein, 434 aa, Spizellomyces punctatus
MSNRTLLRIQKELHDIQKDPEHQFHVWYNDENITHVHALILGPPKTPYCLGMFDFVFNMGEDYPQGPPKVTAMTTGFGRVRFNPNIYSNGKVCLSILGTWEARKAGEKWSAAHGILSVLISIQSLLSDKPFHNEPGHEHETDETVIEEYNQKIKHETLRVSLCDRLEEYLGWTTSNDSNRREGSKSIKRSFCNCQSQSPFIDIVKRMFLMYYDIYLDVVDVESTKVRDGTAFKLARFEFGNNLMDGHYQYSSIRTRLEAIQKALLAETTQWIRESRQWLTSETTTASNLRSQFDQITASREYDGSILLELEEDNPFSWSVTIIGMPMTQFDGGMFRAQIVFHDSFPEVAPRIRFVCEMFHPQVTRDGVPYYRVQRPEDVRQYLDALKKLVSEEPLADPTTHLNPKAAMLYWGTKEQRRDYNRNARRAAQRSAEY

SEQ ID NO: 4353 - protein, 376 aa, Spizellomyces punctatus
MGEDYPQGPPKVTAMTTGFGRVRFNPNIYSNGKVCLSILGTWEARKAGEKWSAAHGILSVLISIQSLLSDKPFHNEPGHEHETDETVIEEYNQKIKHETLRVSLCDRLEEYLGWTTSNDSNRREGSKSIKRSFCNCQSQSPFIDIVKRMFLMYYDIYLDVVDVESTKVRDGTAFKLARFEFGNNLMDGHYQYSSIRTRLEAIQKALLAETTQWIRESRQWLTSETTTASNLRSQFDQITASREYDGSILLELEEDNPFSWSVTIIGMPMTQFDGGMFRAQIVFHDSFPEVAPRIRFVCEMFHPQVTRDGVPYYRVQRPEDVRQYLDALKKLVSEEPLADPTTHLNPKAAMLYWGTKEQRRDYNRNARRAAQRSAEY

SEQ ID NO: 4354 - DNA, 1426 bp, Spizellomyces punctatus
  source 1..1426: mol_type = other DNA
aaatcagttatacactcccataccggtagtacggaacaccatctcgtgtaacttgtgggtgaaacatttcacagacaaagcgaattcgtggggcgacctcaggaaatgagtcgtggaagacgatttgagcacgaaactacaaaaaggtaactgagatcatttgcaggctttgcgggtctttcaacagggtgcacaccattccgccgtcaaactgtgtcatgggcatgcctataatcgtcacggaccaggagaaaggattgtcctcttcaagttccagcagaatggaaccatcgtattctctcgacgctgttatctgatcgaactgtatcacatgcatttaggaatgagacataacggatacaaaataacatggctccgcacttgacttcgcaggttgcttgcagttgtagtttcgctcgttaaccactgccgagattctctttgaccagcaacgaatgagcaaccgtatgtctcggtagcagtcattttaaaccatcattgcgtaccgtatccactgtgtcgtttctgccagcaaggctttttgtatcgcttccaaccgcgttcgaatcgaggaatattgatagtgccctaaaaaaaattgcatggagttggttgctgatgacgcaagatggggtcatggaacataccatccatcaagttgttcccaaactcaaacctggccagcttgaatgctgtagtattgttcaaacaagaacactcagcttcaaaggggcgtatgtggataacgatttggctagactcaccggtcccgtctcgtacttttgtcgactcaacgtcgaccacatccttgtgttgtcaggacattattccgatattatctcgagcgctagttctctttaattcacttaccaggtatatgtcatagtacctaagtaagatgttaacagaaggtcttattcttgaaacaaatagatgcacacctacatgaggaacatcctcttcacaatgtcgatgaacggagattgtgactgacagttgcaaaagctgcgcttgattgatttgctaccttcccgcctattagaatcattactggtggtccagcctagatactgtgtgaaagcaccatctgagaactttgctagccgttcgcggatcaatcagcactaacctcttcgaggcgatcacataatgacacccgtaacgtttctgaagttgacttaagtaaacaatctatgcatgtgccagagtgggcctaaaatattctcaccgtgctttatcttctgattgtattcctcaattacagtctcatctgtctcatgctcgtgcccaggttcgttgtggaatggctaacgcacgatggaagtgcttgatgaacaacgaaagaaccacttaatgcgcaggaaataagtttatcaaccttatcagaaagtagggactgtatagctgaaggttcaaagttgaggtt

SEQ ID NO: 4355 - DNA, 1605 bp, Spizellomyces punctatus
  source 1..1605: mol_type = other DNA
agcatgaatcatcgcaatcggcgctgctaggaggaaatcgcgcttatcctgcacactttccaaggcgcgaagagcttccgtagggcggcctgaggggagcacaacagagttgttaaatgtaggattagcttatcatatttataaaagttaccttcgaacacggtactagcggcccgccagaagagaagaagtggatcaccaactttcctcttgaggcgatcatcacatagtgaatatgcatgatggaatagtttcctgcgacagaaatagttgatctatgtgtatagcatcataagaagcaaaataaatgagagcaaaagtgactgtgatatgcatacagctgcaaggtcctcgtctgcactcatctggttgaaattggtggatggacgtgcttgcgacgtggtgcgtctaataagcgcgtgcttagcttcgtggcatgtcacatgacaacacagcatagtgtggaggtgattgaaaatggcactaggactcattattatccggctcaatccggttaatcatatcgcataatcagcacccccatctactgctcaaaacggtgtggcatgtattgtaatgttttttttttttttttttaaactgcggtgaggcgcatgccaaaggtctgtaaaaggggggccttttccctctttcctctttacccatcctcgactcgcaagcatctgcacaaacgctcattgcgacctcatagcgacccacattgcaacctcatcgtgactcggtcaaccatgagaacgccgatgtggtggtgttgaggacctcgaccgcccgacagcaaccgtgatcagaaccagcggcaaccaatcggatctgataacaaaacctactattatgctgccacatttgttgagcttggttggtatgtaccgatggcatcatctcttttcatgtcattctgtcgctgacatgcagttttagtctccaagtcttgtcactgaacatcctctggcttgtgatgctgcccagtcgattcgctcctggatgcaagagtctggcttcaatgccatcaagagttccagatcaaggcctagtagggaccgcgtgtggtggtgggcaattatccggttagaaccaaccgttacgtattgcgtgtataattgcctagtagtagcttttccgaaccggttgtcgccggtttattccctggtgtagtagctagtgccagtttctgtcacctctacactaaacaactgaattgaattgcaatacaaggcaccaggatgacaaaaatactgctgctgtacactttttatctctcctagtctgacatacgaccgacggtatacgaaagaaaaaatatgtaacaagaaccatcagcaaaaaaaggcgacgtctctttactatgcaattagtggtaatttaatattcagcgcttctctgagcagctcgtcttgcgttcctgttgtaatctctgcgctgctcctttgttccccaatatagcatggccgctttagggttgaggtgcgttgttggatctgccaaaggctcttccgataccagtttcttcagtgcgtcaaggtactgtcgcacatcctccggtcgttgaacactacagtcatggtaggttagcatgtacaattgttg

SEQ ID NO: 4356 - DNA, 1217 bp, Spizellomyces punctatus
  source 1..1217: mol_type = other DNA
tactgtagacatgctatgcgaaatagatttacggactgccttttcctatttcttggcattcatcagtgatattctataagcagtcaagttgtgaggcgattgttgtgcaagttattcggagtttatctgagaactccttcttgcctcaacacccaatcaacagcctcaccgacatcctgaacaatcacttgtggcttgttctttttggttaatggcattccgtccctgtatacacccgactttacaagaatgccaacccatccatgaagatttgccccggcaatgtctgaatccgggttatccccgaccatatacacctttttgacctctacacccgcagcggcactcaacatcttttcagcaaactcatacgtgggagatgagggttttccaaattgtttctcaatgacaagcgggtttccgctcaatcttttccagactgcattcaaggcagtcacgaacgcgccttgaccgtaccgcggccacggccattcattactccactgaaaatccgcattcgaggagtacaagggtgtagattgggagtagggacgagacggttggcgtgttgtaattaatccagattgagaggcgagtgtatcggtgatgagttggatgtcgaggccccagtctattggatcgtggaagatgagggtggcggatatgggagtttgggatagatcgtaaggacattgctagaaaatattgacgagtcaatctaatgcatccaatcacaaaggggtcccaatcaagaacagaccgtgtcgtccacttcgtccccaacagagcgatatggccacatgcttttatcgaacgccttcatttccttggacgttaccacatcgctgaatccataggattgtgcaacatttttacactcatcaggtccgacaacatggaccaatttgttcttgtattggggtgccaggtgacgcatcggtgaatgggatagaacgatttgcgatggatggatctagaaacatcgccgtattaggatgcggattcgttggattttgagtgttttttttagtacctcaataccgagcttttgggttaatttatgagctttactagcttctgattctccgcctgaattcgttaaaataatgaatggaatttctctaaacgaaagagtcaattgtattcaatgggtccaagccaatttcatctctttccacaacatacaacaagcagttgtgacttgtcgcaaaaccatg

SEQ ID NO: 4357 - protein, 352 aa, Spizellomyces punctatus
MAPVARFRFHALRRYSSISTCPTTSTAALAFDMDGVLIRGGRAIPSAHRALQKLKGDNPLNREIPFIILTNSGGESEASKAHKLTQKLGIEIHPSQIVLSHSPMRHLAPQYKNKLVHVVGPDECKNVAQSYGFSDVVTSKEMKAFDKSMWPYRSVGDEVDDTQCPYDLSQTPISATLIFHDPIDWGLDIQLITDTLASQSGLITTRQPSRPYSQSTPLYSSNADFQWSNEWPWPRYGQGAFVTALNAVWKRLSGNPLVIEKQFGKPSSPTYEFAEKMLSAAAGVEVKKVYMVGDNPDSDIAGANLHGWVGILVKSGVYRDGMPLTKKNKPQVIVQDVGEAVDWVLRQEGVLR

SEQ ID NO: 4358 - protein, 475 aa, Spizellomyces punctatus
MKRDILIVGAGPSGLAALKALKQHNQTKSWKLVVAEQRYGIGGVWLPSSLTPIPPDLPSSPIYDSLTTNLPHPVMAFYSHPFPRATPLFPGHPVVLKYLQAFAERFALLSHIRFGHKVVGAEWDPRVQKWRTRFCTRKRNTPEMADASEHERAANASEEMYDAILVCSGHYHYPKTPDWPGVNEWTLHGRTLMHACYYRRPQPFRNKVVLIVGAGPSGRDLSNEIASVARQVYHSVPWAWHPARSATPIVHTTSSGIALKPPIRRFHSNAIEFEDGTQLTDVDIVIAATGYFYRYPFLPSNILYDPSQSPTAPSSASLFCDGSHVEPLYQHMFPITPTSPAAPNLIFFGLPSKVVPFPLFEIQALVATNLLLGKKQLPPFDAFQDIPHSHNLPNEKQFAYCNSLAEWGGVRDWQVKDWVVEMYAKKDILRKTWQEVERRGEQHLQEWIGGVEGENEWVNVMRRLIALGEEQASQG

SEQ ID NO: 4359 - protein, 445 aa, Spizellomyces punctatus
MGRMLIVLTKIATSRLPSSLTPIPPDLPSSPIYDSLTTNLPHPVMAFYSHPFPRATPLFPGHPVVLKYLQAFAERFALLSHIRFGHKVVGAEWDPRVQKWRTRFCTRKRNTPEMADASEHERAANASEEMYDAILVCSGHYHYPKTPDWPGVNEWTLHGRTLMHACYYRRPQPFRNKVVLIVGAGPSGRDLSNEIASVARQVYHSVPWAWHPARSATPIVHTTSSGIALKPPIRRFHSNAIEFEDGTQLTDVDIVIAATGYFYRYPFLPSNILYDPSQSPTAPSSASLFCDGSHVEPLYQHMFPITPTSPAAPNLIFFGLPSKVVPFPLFEIQALVATNLLLGKKQLPPFDAFQDIPHSHNLPNEKQFAYCNSLAEWGGVRDWQVKDWVVEMYAKKDILRKTWQEVERRGEQHLQEWIGGVEGENEWVNVMRRLIALGEEQASQG

SEQ ID NO: 4360 - DNA, 1899 bp, Spizellomyces punctatus
  source 1..1899: mol_type = other DNA
tacaatatgcaaattgtttctcgttcggcaggttatgcgaatgtgggatatcctgaaaggcatcaaagggtggaagttgcttcttacctaacaggagattagttgcaacaagcgcttggatctcaaacaatgggaaaggaacaactttggacgggagtccaaagaagatgagattaggagctgcaggtgacgtcggtgttatcggaaacatgtgctggtagagaggttcaacatgagaaccatcgcaaaagagggaggcacttgaaggcgcggttggagattgggatggatcgtagaggatattggaaggtaaaaaagggtaacgatagaaataaccggtggcagcaatgacaatatcaacgtccgtcagttgtgtaccatcttcaaattctatagcattcgagtggaatctgcggatgggaggcttgagagcaatgcctgacgatgtcgtatggacgatgggtgttgcagatcgtgcaggatgccatgcccaaggaacagagtgatacacttgtcgtgcaactgacgcaatctcattgctcagatctctccctgaagggcctgcacctacgatcaacaccaccttgttgcgaaaaggttgcggtcgccgatagtagcaagcatgcatcaaggttcgcccatgcagagtccactcgttgacgcctggccaatccggcgttttgggatagtggtagtgtccagaacacactagaatcgcgtcgtacatttcctcagacgcgttggctgcgcgttcgtgttcagacgcgtcagccatttctggcgtgttccttttccgcgtacaaaatcttgtccgccatttctgaacacgaggatcccattctgcacccacgaccttgtgcccaaagcgaatgtgcgacaagagagcaaaccgttccgcaaatgcctgcaggtatttcaatacgacggggtgaccgggaaaaagcggagtggctcgggggaacggatgggagtagaacgccatcaccggatgaggcaaatttgtggtgagcgagtcgtagatcggggacgagggcaggtccggtgggatgggcgtcaaagacgacggcagcctagaagttgcaatttttgttaaaacaatcaacattcggcccatccgttgttcatgtgcaactgctgatcatagttcaattttcaataccaaacaccgccgattccatatcgttgttcagcgacgacaagcttccagctttttgtttgattgtgttgcttgagtgccttcaatgctgccagtcctgaaggaccagctccgacaatcagaatatcccttttcatcgttttgtgttgacaaaggattcttcacggtggctgggagtttcaggttgaaggagggggggaaccttaaccttttttcgtcagggaatttcaatagcagggggatgttaatgaatgcaagtgaaagacgtttgaccgcggtagcgtttagcgttgttttgcgtgaacaaagcaaaccgccagttggaaagggggggcccacggcgtcacggcaaaaatctacaagtggtaagcctcgttctttaactgcgtggttttcttgctgtgtttgagagacatgaattgtgccaaatatccatagtaacacatttaatggctgtgcctcctatgccttgttcatctccattttttttgctttttcccacaaacaccccatccgctcagcaccaacgagagagaaaatgggctgaacaaaagagacaaggataaaatgtcttgaaattccgtccgtggagtgaccgtggtgggtggttccaagacactggatactgggtgcatggggtccatagcaaatacgggttctagacccacaagtcccatgcgctcccaatcatgggtatgccaatgaccaggagaacggcaaaatgtcaacgttcaaatagatgg

SEQ ID NO: 4361 - DNA, 1610 bp, Spizellomyces punctatus
  source 1..1610: mol_type = other DNA
gcccgtacggcagacagtaatcagctcacacacctattcaatgggttatcacccttcaacttttgcaatgcacgatgggcacttgggatcgcccttccaccgcgaattaggacgccatccatgtcaaaggcgagagcggctgtggatgtagtcgggcatgttgagatgctactgtatcgacggagggcatggaagcggaagcgtgcaacaggggccatatctgggtgggaagactgggctcgcagatgggttgaactcgttgttcactgatggttctcccactgacggcgcagtcacaatctgacgatcaggatacgtaagcggcgcagactttccactcctgcactcaacccaatatggaggttagaatgcattgattcacttaaatgcacgcagtcactgccccgtagttgcagtgtgccgttggttagcggtgttactgtgccttaatcttaactttatccatagtttggaggtgattgaaaatggcactaagattcattattatccggctcactccggttaatcatatcgcataatcagcaccccctctatcgctcaaaacggtgtggcatgcatgtaatgttttttttttttttttttttttaaactgcggtgaggcgcatgccaaaggtctataaaagggggaccttctgtctctttcctcttgtttctttatccctcgactcaaagcatctgcccaactctcatcagtcatgagaacgccgatgtggtggtgccgaggacctcgaccgcccgacagcaatcgtgatcagaaccagcggcaaccaattggatccgataacaaagcctactattatgctgctacacttgttgagcttggttggtaagtaccaatggcatcatctcttttcatattgttctctcgctgacatgccgttttagtctccaagtcttgtcactgaacatcctctggcttgtgacgctgcccagtcgattcgctcctggatgcaagagtctggcttcaatgccatcaagagttctggatcaaggcctagtagggaccgcgtgtggtggtgggcaattatccggttagaaccaaccgttacgtattgcgtgtataattgcctagtagtagcttagttagcttttccgaaccggttgtcgccggtttattccctggtgtagtagctagtgccagtttctgtcacctctacactaatcacagaactattactgcgggtggaatatagacaatcagttagaatttcagtttttgcccagggtaaatgatgtgtgaggcccaatctcttcctgtactatggagatatcagaatatgcaagattctataaatgaccgtcgaagggtgctgcatccgaggacggtagccattcaggctttagacgtattgaatatactcctaatcacccctgactggcctgttcttctcccaatgcgattaatcgtctcataacattgacccactcattctctccttccacgcctccaatccactcttggaggtgctgctcacctcgtctttcaacctcctgccaagttttccgcagaatatcttttttagcgtacatttccactacccagtccttgacctgccaatctcttacgccaccccattcagcaaggctat

SEQ ID NO: 4362 - DNA, 1360 bp, Spizellomyces punctatus
  source 1..1360: mol_type = other DNA
cctgaatgttcagcatgtaaccgtcaaccttgcggccctgcatctcgtagtaagcatcttcagcatccctggggtcctcgaactcaacaaacgcataactgctaagccaatccggtcatcaaggcgagagagaaacgcgaaggtgagagggaagggaagggagggtatagattagacaacttgcaacgtaagaaatcgatacgatcgcccgccgcgcaaaggactcgactattgtgaatcgtcctcgtccgcacgagcgatacttctttcaaaagaaagactgacggtggatatgagcatactacatatcaatatcgatacttacggcttggccgcagctccccttggagcgggaatgtcacaacggacaagcctgccatacctggaattacggcaagtggaagctgtgagcgcggaagagtatggaacgacgatcggggaagcgcggaaccgttacctctcgaattcaaaggcgagatccctggcacgtgtacgagagccaatgccagcaacaaagagagtcgtgcgtctgtggctcattgtcaagagaatgcgacagctgtgaaaacaaaaatgatttccaagagatggaaatgggacaaacagatggagagggggcaacactgaaaaaggttttgaaagcgggtttggtgtgatagaaaattaaccacgtgatgtaaggtgcagccaatcacacgcgcggaaggtaattgttgtccgaaggcttcggtcttcgccattcgccatggccatgcagtgctttcttgctcacgtcgtatttcgtatctgatctcgttggttgttgtttaaactatctctggtgttgagaaccgatgcagtgctcaaggggtgtataatcaatgcattaaaagttgcggcagactgcagattctgtttgaaatcttccaaaaacatttaaaaacacttttcatgacagctcagttccaatgattgacattaaacaaccccgactattcttccagtatttctttcaattcttcatcatttttgatatccggcctttccggatcaaactcttcatccgcaatttctgcctcaagcttgggatcgaccttttcgcccgtacgcttttcgtggagcttgtgaatgcaagtacggtcgatttagttgagggtatcactgagcggactcttacaagatggttgaactgcaaacctcggcaaatttctctgcagcatgaagccggcctttcggatagttgccttgattatgggctgcggcctacaagacacaaaacctgattgaatcttccactcgttatatttaaagcaactaaacactgcattggaaccttgtaggaacgctctcgacgaccttcgggatcgtctgcctcagcggg

SEQ ID NO: 4363 - DNA, 612 bp, Spizellomyces punctatus
  source 1..612: mol_type = other DNA
gtggcaccgttggcctccaaccagtcttgcgccttcttcaatgcatcctggatttgcttcttgtcgtcaccctcaagtttaccaccgagctgggagtcgtcagagagctggttcttcaaagagtacacatagctgtcaaaagcgttcttggcttcgattttctccttggtgagacggtcctcttcggcaaacttctcggcctcttgtaccatgcggtcaatctcttcctgactcaggcgatccttgtcgttcttgattgtaatggattcactcttgcctgtgcccttatccacggctgagactgtaaggagaccgttcgcgtcaagtgcgaaagtaacttcaatctgaggaacccctcgaggagctggaggaatgccgttaagttcaaatttgccgagaagattgttgtccttggtcaatggacgctcgccctcgaacacttggatcaagacggtaggctggttgtccgcagcagtagagaagatttgagatttcttgttgggcacggcagtgttacgaggaatcagtttcgtcatcacgccaccagtagtttcgatacccaaggtgagagggttcacgtcaacgaggagtacatcgttgagttcagggctg

SEQ ID NO: 4364 - DNA, 1427 bp, Spizellomyces punctatus
  source 1..1427: mol_type = other DNA
aatcgtagccgttgatggatggagactcattttaacttggtttgtatgacgcttctgaacttttgttcaagctgaaagttgctagtcgtaaatggtattatcatagttattaaggcgcttatttggctcattgttgagtcgatgggcgtcacaatcggcaagcccgcaactgatcgttacgtacaaccatcgttctcatcacgcaagctccatggccaacagtactaacgatattcggcacgtaccctgacacttgtgtcaagattcacatcacatagtgtggaggtgattgaaaatggcactaggattcattattatccggctcactccggttaatcatatcgcataatcagcaccccctctatcgctcaaaacggtgtggcatgcatgtaatgtttttttttttaaactgcggtgaggcgcatgccaaaggtctataaaagggggaccttctgtctctttcctcttgtttctttatccctcgactcaaagcatctgcccaactctcatcagtcatgagaacgccgatgtggtggtgccgaggacctcgaccgcccgacagcaatcgtgatcagaaccagcggcaaccaattggatccgataacaaagcctactattatgctgctacacttgttgagcttggttggtaagtaccaatggcatcatctcttttcatattgttctgtcgctgacatgcagttttagtctccaagtcttgtcactgaacatcctctggcttgtgacgctgcccagtcgattcgctcctggatgcaagagtctggcttcagtgccatcaagaattccagatcaaggcctagtagggaccgcgtgtggtggtggacaattatccggttagaaccaaccgttacgtattgcgtgtataattgcctagtagtagcttagttagcttttccgaaccggttgtcgccggtttattccctggtgtagtagctagtgccattttctgtcacctctacactaaaggctaccatgaaacattgtgatttgcaaccagataacaatacaatacaatggtaaaataaaaagacagtcaatccaaaagaatgaaaaaggagaaacgtgaaaacgtgttctatgtaacaagcaaaagaaaatagccaaccatccccatttatacacgttggaagcataatagagctatatgaaatccaagcagattttcagagaatcactacacagtgctctgcggctcacatgaggacgtctaatcaaataacatgcagtgtgcccccaaattccaacacccattcccaaagactcgacagtcttacaattcgtcgtggtcgtgggcttcttcctccgatgcaccaccttcttcaccagtctgctggtagagtttggcagtgatggggttcaccacagcctcgagttcgctcttctgctcttcgaggtcctccttcgtagcg

SEQ ID NO: 4365 - DNA, 637 bp, Spizellomyces punctatus
  source 1..637: mol_type = other DNA
ccacccaacgacaacattttcccacgctctctctctccatgacgagcgccagcgagtcatggccctatccgtcacccgaacgcgaacacaaacgcgaacgcaacaatacgccaagaaagttgtgtgagagagagcattcccacccagcgacaaaatgttcccacgctctctctctccatgacgagcgctagcgagtcatgccctatccgtcacccgaactcgaatgcgaacgcaacgaacgctaatcccgaaccctaaaacccgaacgcgaacacgaacgctaaacccaaactctaaaatccgaatcctaaaacccgaatcctaaaacccaaaccctaaaacccgaacgcgaacgctaaacccaaaccctagaacccaacctaaacccgaaccctaaaacccaaactctaaaacccgaacgctaacccaaaccctaaaaccctaaacctaacccaaactccaagccctctctctgctgccctcgctaacgctcagggagcatcgtactcacatgcaaagcagcgaagcactggtctgggcagcagtcacgttaaacctctgattcttgaaatagagaccacctgcgagaaaggatgcacctaggaccaagagcagattggagaggatactccccaat

SEQ ID NO: 4366 - DNA, 1316 bp, Spizellomyces punctatus
  source 1..1316: mol_type = other DNA
tatcattattctctctctctctctctctactctctactctctctctctctctctctctctctctctctctctctaattgcattcccacatcgccttcttctttcatggtgacatatctactaagcattttattatactctttatagaattgtcaagtgggggaagccacggtttctattttgattagttattctcttctttattcttcttgtttctctctcatctctcttcttgttcttgttcttcttgcaactgggctaaatgaatacgcatcagcctttggtcgctacaacgagcagtctcagtcctgctctctttgaggcactcgctgcaaaacacggcaacttgctacacttggggggcacaaagcgtcctagcgtgcaggatgagggtgttcgcaagaaccacgctcacttgcccactcccattgagggtatgtgcgtttggaattacacaactactagtcactcttgttgagactctatttttgtcgctcgctagacggactgcaggggacacctctgaaaaaaaaaccaggtcgcaagcccgccaccacagagcccgccaataagcgcacggctcaaaacagagccgctcagcgtgcttttagagagcgcaaggaacgctatgtcaaggaactcgaaacgcgtgtcgctcagttggaacaagcacagacaaaggcagaaacgggggaactcgttgatgaaaactctaaactacgccaacgagtagaagagctcgagacggaaaataaattgttgcgtgaagtgtcgtcctttacttttgaattcccacctcaaccgtcatcacagcaacaacaacaacaacaacaatcagaacaacaacaaaatcttacaccagtctcggacacccctaaatcgattccctttcactttgatcaacccaacggctctgcaaatcataaagacgctcccatttctcctgcctccattatccagagcgagcccactccctttacgaaccactcctctcccttttccacaaacagcgccaacaatgaccttccaggcctcgaagcggaatcctactctcttttcgacgacttggccagttcgacgttgtcggtcgtgtcggatgcagaagtgcgagacgaaaatgacctcgacgctctcctcggtggcattcctcttggacaattttcatttactgaacccatccagtctatatctcaacaatcgcaacagcagcaacgacaacaacaaccacaacaacaacaacaagcagcgttttacaatgagcccaacccgttttcagccaccttttccaacccttttaccactgaaaacctcattttc

SEQ ID NO: 4367 - DNA, 1612 bp, Spizellomyces punctatus
  source 1..1612: mol_type = other DNA
aaacttgcttgaacgactgtaatcaagccattgtggagagcaatgagaccgacaatcaattcgacagcgtttccaaatgtggcattcaagagtcccccaattgtctcgtttgtcctgagagcgagttcctctgttgcgagaccaagaagcttggccatgggcaagagagccatgaaattaaaagcaaaagtcaatgcatctggccagtccaatattcccgagaggatgccaagaggacaaaagatgagaagaatattgatccagtttgataagaaaatgtagcgaagggaagttgaccaagagggaggaggaggaccgaatatgaatccagcgtcagagtctgagcgagagacgtttctcaagcgaggagaagcagaagcaggtatagctccatatgcagcgggcattgtgtgtgttccgtttgtagaaacgagtgtgtgtgtgtggagagagagagaaagagtaagatgaaagtcaaaagtcacatgataatgagaacacgcatagtgtggaggcgattgaaaatggcactaggaaccattattatccggattaatccggttaatcatatcgcataatcagaacccccctctatcgctcagattggtgtggcatgtattgtaatgttttttttttttaaactgcggtgaggcgcatgcccaaaggtctataaaaggggggccatttccctctttcctctttacccatcctcgactcgaagcatctgcgcaacgctcattgcgacccacattgcaacctcatagcaacccacacaacctcatcgcgactcggtcaaccatgagaacgccgatgtggtggtgtcgaggacctcgaccgcccgacagcaaccgtgatcagaaccagcggcaaccaatcggatccgataacaaaacctactattatactgccacattagttgagcttggttggtatgtactgatggcatttcttttcattctgtcattctgtcgctgacatgcagttttagtctccaagcctgaacatcctctggcttgtgacgctgcccagtcgattcgctcctggatgcaagagtctggcttcaatgccatcaagagttccagatcaaggcctagtagggaccgcgtgtggtggtgggcaattatccggttagaaccaaccgttacgtattgcgtgtataattgcctattagtagttagttatcttttccgaaccggttgtcgccggtttattccctggtgtagtagctagtgccagtttctgtcacctctacactatgaaatgaaaaagtgtggtaataaatggttgattaaagagagagagagagagagtattgaatgtatataatcactctctctgtgtgtgtgtatataagagaataagagaataaaaagtgtaagaatttgtgtgaggaaagtgtgatcaagtgaaatggataaatgagagagagagagagagagagagagagagatggtaaaaagtgcgagcgtgaacagagtctctctctctctctctctctctcttgtcttgaatcaactagcgtttgtgtgtgtgtgttttatatattctctcttctctctctctcgtttgtattcaatcaattagtgtgtttatgagagagagaattccttta

SEQ ID NO: 4368 - DNA, 1316 bp, Spizellomyces punctatus
  source 1..1316: mol_type = other DNA
caacggatggagacgccaaaaccacgtaaaccccgacctcgccccgttgtgaatccccatgccatcaaaaacgcccgggattcattggaacttgcttctccttcccggaaatcgccgtcaagtgcacatgcgtccttaagtgatgatgtgcagtctgttcaatctggatctgcgtcagcgtcggggtcggagggggttacgaatgaggggattcggaggttggtcgatcagttcccgaccccgccgttggagttggcgaatgatccgtatgcgttccagccggaaaagttgaatgatacgttggaacggaaaacgagacggtaagtttttacctctgaacgtgtaccaataaaacatcctttgaaatgatatttacaatgttgtttattataggacttcccgcccagtatcctcctcctcaacccgctcttcccgatcctacccctccacagcctcactaacccattcctcactctccaccacaaacggtttcggcgccatgttccatccactggaccttccccccattctcagtccaccgattcagactcctgtgacaccacccgccagtccacgtcccgaccgcccaaccacacctactattgacgagtggttgaatttccagagtgtggtgtcgacggatgggtttagagagcagggaaggagggtttcggatctggaggagtggaagagggagtggagtcaggtactgtcttttattgttttttttttggatgataagtgtatttacgtttttttttttttttttttggataggagattagggtatcctccctcccgtccctcacacgccaactctcaaattcaggcaacgaagccctcttgaacgccattttactcaactacacattaggcgtcaaccgactccgtgaaccttgttttgagttacagagagccacgttacgtaaatcaaagagtgaggagattgtacgttgggatgataaactcaacacgacttactctcctcgacctgcgaaaacttcaagttttgcggggacacgacgttcgcttacgatccaagaagacccgcatccaaaagacaagacgacagcgttaattgagtactctacgacgattgatcgacttgagcggccgtcattggattctcaacgggcggttttaaggcctgttcaaagctcgaggaggacgtatggaaaaattcggagtggagattccaccactcaacgtgtggttcaagatggtgaacgtgtgttggaaatgtcctctgcatgcaagtcctcttgcaacgcactgaatacccattccaatgaatccactcacgacactttgctttt

SEQ ID NO: 4369 - protein, 369 aa, Spizellomyces punctatus
MADAQETIKQFTGITGCTEDQAKFFLEANGWDLESATSSYFEDSSEPGTSTRPSGPTSATPHTEPAPPSSSSSSSSRPTRDTRVKTFRDLMEGQAASDSEEEDQTFFAGGEKSGLMMQGGPKSDQLVKKILDKAAKSGPAPEEFKKNEKKTFVGAGYRLGSEDEPVGPSTPAVQPSARTAPEPVERHLTFWRNGFSIDDGPLRGYDDPESQEFLRAINSGRAPTHLLNVAYDQPVEVKVTRNLEQDYIPPPKKPVAAFSGSGQRLGGVTSTLPGSFPPSQSSTTNTTLEINPSLPTTTLQLRLPDGTRLPIQLNTVHTLGDVRRVLGSRPDVSARPFGFFSSFPTKELKEDVSVEEAGVLGAVVVVRWI

SEQ ID NO: 4370 - DNA, 637 bp, Spizellomyces punctatus
  source 1..637: mol_type = other DNA
actttgacttcgacgggttggtcgtaggcgacattgaggaggtgggtgggtgcacgtctaaaaaaagggaattaaaagagtgatgtgtgtgcaagatgggtgttggataccgtacccgctattaatggctcgtaaaaattcttgagattcggggtcatcgtacccccgtaacggcccatcatcaatactaaacccgtttcgccaaaacgttaaatgacgttcaaccttttgataaaatatttagtcaaattttctttacaagggtttggagggaacgtacgggttcgggtgctgtccgcgcagagggttgaacggccggtgtagatggaccaacgggttcatcctcggatcccaaccggtatcctatataaaaccataaacaaaaaccattttgaaaaaaacaggaactaagaacattaccagcgccgacaaacgtctttttttcattctttttaaattcttcaggggctggtccagatctaaaacattcaacacattttaatatctttcgcacagatccaaaacctaatacaagaaaaaaacatacttggcagctttatccaaaatctttttaacaagctgatcactcttgggtccaccctgcatcatcaaccccctaacaaaaaaacaataccag

SEQ ID NO: 4371 - DNA, 1612 bp, Spizellomyces punctatus
  source 1..1612: mol_type = other DNA
ggaacccatcacacccacccaaccctactctattcaccccacaaactctaacggtacccctaaatcgagggtgtttatcccgccccctcgtttggatagtatgatgaagaaacggaggtggaggggtttaaagaggcttgtaggtatgtaaagaagacgagtttttttttttttatatagtttgtatagttttatttttttgtttttgaatatattatataggtgttgttgttgttttagtagaaaaagtatttttttttgtattttggggtttggaaaaaaacattttgtgttttgtttcaatagagtatacccaacgacgacgacaaagatacactccttacattacaaacatagtgtggaggtgattgaaaatggcactaagacccattattatccggataatccggttaatcatatcgcataatcagcacccccatctatcactcaaaacggtgaagcatgtattgtaatgttttgttttttaaactgcggtgaggcgcatgccgaaggtttataaaaggggggccttttccctctttcctctttacccatcctcgactcgaagcatctgcgcaacgctcattacgacccacattgcaacctcatagcgacccacacaacctcatcgcgactcggtcaaccatgagaacgccgatgtggtggtgtcgaggacctcgaccgcccgacagcaaccgtgaccagaaccagtggcaaccaatcggatcccgataacaaaaactactattatgctgccacattagttgagcttggttggtatgtaccaatggcatcatctcttttcatgttattctgtcactaacatgcatgtatagtctccaagccttgtcactgaacatcctctggcttgcgagtctcccagacgatatcaactctcttgcgaagactctggcttcaatgccatcaagagttccagatcaaggcctagtagggaccgcgtgtggtggtgggcaattatccggttagaaccaacggttacgtattgcgtgtataattgcctattagtagcttagcttttccgaaccggttgtcgccggtttattccctggtgtagtagctagtgccagtttttatgtcacctctacactatgcactgtatatcaaatcgcataatgggcgcattgccatacagacatcttgtttgcaaaagaatatatgtattatttgcaacatgtacatcaacaaaacccacaattcttaaatccacctaacaacaacaacagcccccaaaacccccgcctcctcaacagacacatcctctttcaactcttttgtcggaaaactcgaaaaaaacccaaaaggcctcgcactgacatcaggtcgactcccaagaaccctccggacatccccaagtgtatgcaccgtattcaattgaatggggagacgtgtaccatctggaagacggagttggagggtcgtggtcgggagagatgggttgatttccaacgtcgtgtttgttgtacttgattgggatggggggaaggacccggggagggtactcgtcacaccacctaatcgttgtccgcttcctgaaaatgctgctacgggtttcttggggggtgggatgtaatcttgttcaaggtttcgcgtg

SEQ ID NO: 4372 - DNA, 1011 bp, Spizellomyces punctatus
  source 1..1011: mol_type = other DNA
gccgccgctttatcagcagaagtcatttcctttgcttctgaacatagcatacagggtcaatgatataactactagtacgggtagccatccttgtaatcttaacacgcaccggattgcggagatgatgtggaaggatctgattgttggtccttgaccgcatcatttcttttcttggtcggtgatgacggtttctccccaactagcttttcttcaccttggatttcaacatctcttttctgttcgcttttgatatcactcttctggttcacatgagacgcctcattctctggcgccttgttctcaagcccatccgtcaaattgacctcctccgtcttggttttctttgctactttgggctcttctgagtccgaaggactcttgcgcttggcgctcgaaagtgaggggtcctgctctgcttttgtctcattcttagcgtcgtccatagctatgtcatttgcattctcattctccttcacttcgctttctacatctggagcatcgtgtctagtgcgatcctccgaggatgacaactctccattattctgttccccattctccccgttgtccttgtcctcttggacttcacttcctttccgtcccacacgagttgacttccgacgctccttcccgccctttgcaggtgtctcaggtaagtcagcagcagcagcggcttcgttatcaccatcaccctcagctgaaccagatccaccggcctcatcatactcctccagccgctggacgagatcctttttgagtccattcgtggatagattccgtttctttagctcctctttgagcttaaccaccgtgagggagttccaatccaccgttgtcataactgaatggtgtgataaattgcaattcaattcagtatcccgcagcaggtcgtccgaaaacgggcatcagccactctaagcctgccccaagccacaaattacgcggacgaccaatccttcaggatagatcggactggtttaagtgaggtgcgagacaatacgtctgtgtatggtg

SEQ ID NO: 4373 - protein, 436 aa, Spizellomyces punctatus
MFSGLTSSPGPQLDDNALRELVQNQIIREAGVDFESRPILVVYSCYLPNPKNANYDTLLSLLLQRLDQFVENDYVIVLFSAGTQYQPSWTWMFKAYASLGRKYRKNLKNLYIVHPSLWPKLIMQTMGAVVSPKFSRKVVWVYNLSKLGMVLPLKQLFIPDVVYQVDIKYSGGFSNSPTATIPSPTSESKSKVFGARLEDIMGENGEKGVPRVIRDCIRFILVNGIHVEGIFRRSPSSKLLQDAKAAYDRNDEHIDLEAFGGVHLACVLLKTFFRDLPEPVFPSSIYDVIRGITACQSEKEQLEYIKNAILPLLPYPTYMILRATLRLLHQVQLHASENLMTASNLTIVWSPNLVKSDNPLADFNICGMGAQGGGGGTMLKLCIERFVEVFEGEEPWEVVTGTQSEGTEDDGVASVVNTLQNSQVSISGDGGEKRSE

SEQ ID NO: 4374 - DNA, 1363 bp, Spizellomyces punctatus
  source 1..1363: mol_type = other DNA
ttttcagatgcgtgaagctgcacctgatgcagaagacggagggtagctcgcagaatcatataggtggggtaaggtagtagcgggaggatcgcattcttgatgtattcgagttgttccttctcggattgacaggctgtgggtatccggttactgtgcatgaactagctgcaggtttgcgcattggactgactcacctgtgatacctcggatgacatcgtaaatgctacttggaaacaccggttccggaaggtcgcggaaaaaagttttcaaaaggacacaggcaagatgtacccctccgaacgcttccaaatctatgtgttcgtcatttctatcgtacgctgccttggcatcttgcagcaatttggaagacggtgaccgtcggaagattccttcgacatgaatacctgggtaccctcagcagtgtcaatttcaatacgctaggaatacactacgcatgtcactcaccgtttaccaaaatgaatctgatgcaatcccgtattacgcggggcacccctttttcgccgttctcacccatgatatcctccaacctcgctccaaaaactttgcttttagactctgacgttgggctaggtatcgttgccgtcggtgaattgctgaaaccaccggaatacttgatatcgactctatgatgcggactggttaaaccgaaatacgtttaccgcaaggctttgatgacaacacatactgatatacaacatccgggataaagagctgctttagagggagaaccattcccagcttggatagattgtatacccaaacgacctttcgtgaaaatttagggctgaaaagtgaccattcaagagttagccttatattgctctccgaccattgtgcgtatcacacagatcttcgccaggttatgataatgacctcaccacagctcccattgtttgcatgatgagttttggccaaagagaagggtgaactatgtacaggttcttcaaattctttcgatacctgccaaagatccaagacattagaccagtcgccagaaatggtcaataccaacatagcgagatctactattgattgagatccattatgcacttactttcttccaagacttgcataagccttaaacatccatgtccaggatggttgatactgagtcccagcagagaataggactattacataatcgttctctacaaactggtccaggcgttgaaggaggaggctaaggaataaaggcgtggctcacatgaaaaacttttcgcatcacaatgagcaccagatggtccctcacctaagcaacgtatcatagtttgcatttttgggattcggtagatagcaagagtaaacgacaaggatcggtcggctttcaaagtccacaccttgt

SEQ ID NO: 4375 - DNA, 1605 bp, Spizellomyces punctatus
  source 1..1605: mol_type = other DNA
acagctttcgtatctccaataggtggaaggcctcctttctcaagaatatgcacaggcggccgttcccaatcacacaaggcacattatttttgtcggtttcctccctggcgcactagtagaaaaggaagaataatgacatctaccagttctgggagagttcgttggtcctgttatctgtactctagtagtcgcccgctccagatttccctctatcttacccgttttatcctcttttctggtgtattgaggtgttgatggcatatattccatcgaaaaatgaattcagtttcttcccagccaacgactagcgaggcgaacaccaaaagacatagtgtggaggtgattgaaaatggcactaggacccattattatccggattaatccggttaatcatatcgcatatcagaaccccctctatcgctcagattggtgtggcatgcagcggtgtggcatgcatgtaatgttttttttttaagaaaactgcggtgaggcgcctgccaaaggtctataaaaggggagcctttgctctctctccccttcctcaccagttccctgactctcaaaccatctgcgcaacgctcatcgcgacccacattgcaactctcatcacgacttggtcaatcatgagaatgcagatgtggtggtgccgaggaactcgccctcctgactacaaccaactggaaccagcagcaaccactcggaaccaacaaagctgctattatactgctacatttgttgagcttggttggtatgtaccaatggcatttttcttttcattctgtcattcatcttgctgacatgcagttttttttagtctccaagccttgtcactgaacatcctctggcttgtgacgctgcccagtcaatttgctcctggatgcaagagtctggcttcaatgccatcaagagttccagatcaaggcctagtagggaccgtgtgtggtggtgggcaattatccagttagaaccaaccgttacatattgcatgtataattgcctagtagtagcttagttagcttttccgaaccggttgtcgccggtttattccctggtgtagtagctagtgccagtttctgtcacctctacactataaacacgatatcagatctccaaatccaaggcttcgtgaaaatgttctctaggttcaaagtgatattgcagcatgtccccagacattcatgagagcattcgtgcaggtggacagaaaatgtctgtgtaatttggctagaaccttcaaaataagtgacatgcaagtaatactgtacaatataacggcaaaactccgcgcttacgcctaccccaaaacgctattccgacctcttctcacctccgtcaccactaattgacacctgtgaattctgcagcgtgtttacgactgatgccacaccatcatcctcagtcccctccgattgtgtacccgtaacgacctcccaaggctcctccccctcgaatacctctacaaaacgctcaatgcacagcttcagcatggttccccctccacccccctgagctcccattccgcagatattaaagtccgcaagggggttatcgcttttaacaaggtttggagaccaaacgatggtaaggttgctcgctgtcatgagg

SEQ ID NO: 4376 - protein, 212 aa, Spizellomyces punctatus
MTTEIVRALRARPPAPTASEMFHANIKKGSLNVETSGGIMHVSAGMADLAVVPANSVYGHVSAKAKSTKATDSTPTRRPSQLVVKAPDEQISEYPRRRAMSARRASEYTPVRDSKSKTPLVITHENVTALAKMSKAKDSSSETCTARRNRSGSAPPAVARVLGIAEKGDASQRRKSVVFKNDGRPPSVLAATDRAPAEQRLSKYEIKSNYQK

SEQ ID NO: 4377 - DNA, 2087 bp, Spizellomyces punctatus
  source 1..2087: mol_type = other DNA
aaagctgggatatccaaaccgccccaccaagttccaacacctcggcctgttgccagacctcatagtccggatgaccttgacgatctcggtaggatcgcgcgctagcatcgcatgcgtattatgacgtctgtttctcactttgatctacttcagaaacggatgtgcacaagtggctagataatgccaatgaaaatgaatttgatgaaaagatggattcttacctgcaaaccgagaatcttgtgcatttctcgcagcctgtcaaaccccctattcaaaggagagtatcaaaacaatacggggctgccgttcataaagacgcagaagcggtgctccgtcagcaggtataaacactcaatgccattccatttttggttgcctatgacagactgttgttacaatggtacttgcagttcgagacgctcttaaattccaacgatgcgccaccgataggacctcgagacccattacacatgttgctagtcagtcgaggcatggttaagacaccatcacctggccggacggcgttcggcgatgctcgagaaatgagcatcaggcgaacaccaagtcctgagggtagagatcctactggaatgactgcgtctatgctattgtcgaggagatcccaagcggacagattgcatcagtctgtcccggatcaaccggagcatgaggcagagaaacaaccggaagacataggagcagaaggagagaaaactgcatggtaagaagttgagtaattatgttaaaatggcatttattaacttttgacaacactaggaacctctccagcgaggtaactcaagcattattgcaacgcaagattggacgtgatgccaagatgcagaaacaagccaagttacgcgagcgcttaaaaggtcatacctagtaccggcgtatcgggtcaaatatgcgttcttaaccgcactttcttctccattagatccaatggaacgcctgaaaactatacaagcattgcaacatgcttccgcattgaagcatggtggcgaggccacacgtaatggcgtaatctatgaatgggatgttctgacagcaaaagacctaagacccgactacctacagcgacgagagccgaagagattgccaccgttagaccatcactttgaaaatcctgctcagacgaaccttggcaaaagtaagatttttttcggggattactgccatcattactgtatgaccgacgcttgagtaacagcaccaggtccagtcctgctaatcaacaattacgtatccaaaaaactgatgagaaaccatcgcgacaaagaatcccccgagccgcaaatccatgcagtgaccccacatctcgcagatcccgacatcgggcatcacaccgcaacctaccatgtagacgctggcccacatagccatcgccagttgcactacgcattttaccatgcagagtatctgccgtcgctaaaggatcatggatatactggaccgaccctgacaacacggcaacagcaactgatagatagaaaggcttgaagtggttggccatttttggactgtacatatatatgtcacttttgataattagattttatttcatactttgaaagcctttgttcagcaggagctctatcagtagccgcaagaaccgatggtggacgaccatcattcttaaaaacgactgatttgcggcgctgcgacgcatctcccttctctgcgatacccaaaactcgtgccactgccggtggtgcactaccactgcgatttctacgagcggtgcatgtctccgaactcgaatcttttgctatgtacatgtcattaacatcattagcactgcgggaaacgcaaaggttaatccctgaccaatgcatagcgcagccctacctttggacattttggcaagcgcagtaacgttctcatgtgtgatcaccagtggagttttgctcttactgtcccttaccggagtgtactctgatgcccttctcgccgacatggcccttcttcttggatattccgatatttgctcatccggtgctttaaccaccaattgtgatggtctccgagtgggagtactgtcagtggctttcgtcgactttgccttggcgctgacatggccatat

SEQ ID NO: 4378 - protein, 483 aa, Spizellomyces punctatus
MALPTHDQPPPSHSIAGRGHSMDDQPENLFLPFVYGPPSRSGLPWSTLVLYALATVGILSLFLHLSGGRQRKPSKSHKRRRKVTKQVVPTPTGGLADASEAQLTKLVQVEEEEETESDEDETPRRDYGKVVGDTLTNAMVNGAVLLKRSPIPDLLASMTGYGLEGYKRVNNAFNVEEKMVKASQKAVSAGIQATGIFAHAAIKAGLAYQMAPGRREKVQRLAIREGTDDEDKRVKVVRIIENAVPGSIPPPVLVDVSTQTDEDLVNGEATGPATATGGVSSVLASYLASSLRVAGNVATASSEVVLGKDRTLKLLGVDPIEARRNPDAPEDGNVRYINVGGILYATTLETLTAAEGSLLAEWFGDESKRASLEIKDGSYFLDRSVMELVDKLVRRVIPGGISGRAVLLAGNALLVATAIGILWLYDGTHFRHILNYLRGLPTHDTMSGAASLKQLLLEAEFYRLPDLADDVARRITEVELEEQ

SEQ ID NO: 4379 - DNA, 531 bp, Spizellomyces punctatus
  source 1..531: mol_type = other DNA
ctttagtgaggcggcacccgacatagtatcgtgcgtcggtagaccgcgcaaataatttaggatgtgtcgaaagtgcgtacctgccaagaaatgttaagctatgcaattctcattattcaagtgcggggttccgccttaccatctctgtcaaggaaataactaccatccttgatctccagactagcccgcttgctttcatctccaaaccattcggcaaggagagaaccttcggcagcagtcaacgtttcgagagtagttgcatacagaatacctccgacgttgatatatctcacattcccatcctcgggagcgtctggattgcgccgagcttctatcgggtccacccccaaaagtttcagtgtccgatctttaccgagcaccacttcactgctggcggtggcaacgttccccgccacacggagagaagaggcaaggtaagaagcaaggacgctcgaaacaccacccgtcgcagtagctggcccggtagcttctccattaacgagatcctcgtccgtctgcgttgagacatcc

SEQ ID NO: 4380 - DNA, 1444 bp, Spizellomyces punctatus
  source 1..1444: mol_type = other DNA
acagaatttgcaggaaccacggcgaggtccgccatgccggcactcacatgcataatgcctccagaagtctcaacgtttaagcttccttttttgatattcgcatgaaacatttccgatgcagtcggtgctggcggccgtgcccgcagagcgcgaacgatctccgtcgtcattttgccttgctaaaaacctcaagtacggcaagcctttggatgaaatcctttggataatggtcaaatgttcggagccccaaagcgccttcgtaatctcgggtggcttaggctggtgtcttgctgcgcaacacgtgaatggaacatagtgtggaggtgattgaaaatggcactaggatccattattatccggataatccggttaatcatatcgcataatcagcacccccatctatcgctcaaagcggtgaggcatgcatgctaatggtctccaaactgcggtgtggcatgctaatatttttaaaaaagaactgcggtgaggcgcatgccaaaggtctataaaaagggggccttttgctatctctccccttcctcaccagttccttgactctcaaaccatctgcacaacactcatcgcgacccacatcgcaaccctcatcatgactctcaagtccaaccatgcgaatgcagatgtggtggtgccgaggacctcaccctcccgatgactacaaccaactggaaccagcaacaatcacttggaaccaacaaagctgctattatgctgccacattagttgagcttggttggtatgtactgattgcatcattttatttcttgtcattgggtcatcttctgacatgcagtttttttagtctccaagccttgtcactgaaaatcccccagcttgcgagtctccccaatgttgcgaagactctggcttcaatgccatcaagagttctggatcaaggcctagtagggaccgcgtgcggtggtgggcaattatccggttagaaccaaccgttacgtattgcgtgtataattgcctattagtagttagttagcttttccgaaccagttgtcgccggtttattccctggtgtagtagctagtgccagtttctgtcacctctacactaaaagatatcgacatcttgttttacatgtgctgatgggatgcatttacgagaagaatgcgaatggattataatattttgcccgaaaagagcatctagagtatatgtatcatacaaacctttccaattttcagccccattaagctcaatatagccacaaaataccgatagcagtagccacaagcaatgcattccccgccaaaagcaccgcacgcccggaaattccaccaggaatcacgcggcgaactaacttgtctactagttccatcacactttgttcctcgagctccacctctgtaattcgacgcgccacatcgtcggctaggtcaggaagtcggtaaaattcagcttccagcagtagctg

SEQ ID NO: 4381 - DNA, 531 bp, Spizellomyces punctatus
  source 1..531: mol_type = other DNA
ccccagagatattacaagtaaacgccccccaagagcccttccaaggaacccgctgtgcaagggctaaaataactcggagcgtaaagatgtccagacgatcctaaagtcccccttggcctggcctgacgcgttcaaggcacagcaaacttgccacgtgggttcccggcaaggatctcctccgaagcctccgcttcctcttttttcttccaagggctttgtaggcttttagccggccacgggtgcaggccagattagcaaaaaggttgttctaaaacagtgtttgtgagcaacaggtacagcaaaaagcaagaagattccaacaacaaaagggtgtgccaaccggtgtggttcatccaaacatgggccatgaaaccaacattgggtgttccaagcaacaattttctagcctcgtacaatgatctattgtccagctcaggttttcgtccacatagtctttggccaggcgaaaggctcaacaagggttggcgtgctcctcacgtgggtctgtctattagccttctttctggcagt

SEQ ID NO: 4382 - DNA, 1614 bp, Spizellomyces punctatus
  source 1..1614: mol_type = other DNA
agccgtgcaaccagggcagacggtgacagatccacggtatgttgactgaaaacaaaaaatggtggaatccagtttttaccaataatagtttagaaaagggctggatcaactctgcggggagctcataatactgtctttttggtgtagggaaccattagcgatagttgtggagccatgcggacatctcattcaagtccgtggaatttgcgcaacatgcggaaaggacttgagcataggcgactacatgggaaatgatatgacccgagcgacaatcaatatggcgcacgatgctcttggagttacagtcagtcgtgatgtgagtggctataatgttgacacgctcgcattttgtaaatgcatgttaatcccaaaggtcaggtagccgaaaaacttgacaaggatacatcagagcgtttgctgaaggaacgaaagctgacccttatcctcgatcttgaccaaaccgtcgtccacgcaaccgtggactctactgtaagagaatggaaagccgatccatcaaatcctaattacccattcttacaggtaagcacagtaagtggaacgggccagagccctcaattctgacatgggaatgcacacaaggacgtacacgtatttggcataccgcactatcagacgcactacgttaagctacggtaagtgggccatctcgtcaccgaatgccggtccgcctaggactaaacgcgctcataaaagaccaggcacccgggaatttcttgccgatatgaataaaatttttgaaatgcatatttacactatgggatctcgtgcctacgcgaacaaaatagctgaaattatcgatcctgaccgtactttatttaagaatcgcatcctctcgcgcgatgaaaatctcagtaagttcacgttcgtatgaacatggcagaagtatgtagaagttaaacccgctctgtgcaggccgctcgttcaagagcatccaaagactcttccctagcgatcagtccatggttgtggttctggacgatcgctccgatgtgtggcactggtcccctaacttatacaaaatcctaccatgtatgtgttcaacggtttgagcacctctcctcatcctgcctaacatttctgcttccgcagttacattttttgtgggcacgggagatatcaatgcgctcccgacagatccaccgccagcgcaggtacaaactttctcaattttcgtatcactcaacattaccacgttgacctttcttctcacagcagcgaaggccctcattaaatgctggaggtctcaactcaggtcctgatgaaaagagcgatgaggtggaggaagtagaagaatctcaagaggtcctggctcagctggaagatgcccaacaccatgcacttgaggaattggaaaagaatcggcccttacaaaagttaagcgaggagacggaaaaggatgaagagacggagccgatgaatattgatgaatcgcgagctggtgcggagcaagccactcccacatctgtgactcaacctccagcggaccatcaagggcagagtcccagaacgcaacgacggcgacctgtgctttccgaaaacgatcgtgaactcgacagggtgaagcaagtgctgctagacgtccacaagatgttc

SEQ ID NO: 4383 - DNA, 1444 bp, Spizellomyces punctatus
  source 1..1444: mol_type = other DNA
cgtcctggcagtcgttgtcgggtgagcaaccctctccgccaacgacctcgtcgctcccaccaggcccgtcgctctttcttattcgagtctttccacatgtgaggcgcaaaacacacatggcgttgaacatgagcacttttttccccgcccatccgtgcagtacgtgccccatccgcgtacgctatcctgcttcctgctcggctgtgaacctttactatttcctatgcctatgcgtatagcatggccagctcttccttttcaaactcttcaaaaacgaatgttcccatcctccaagtggctgtgtgattcataaacctatatttgtactaatgacacgatgacatgaacgaccaacgccccatagagtggaggtgattgaaaatggcactaggactcattattatccggctcaatccggttaatcatatcgcataatcagaacccccatctatcgctcagattggtgtggcatgcatgtaatgtttttttttttaaactgtagtgaggcacatgccaaaggtctataaaaggggagcctttgctctctctccccttcctcactagttccttgactcttaaaccatctgcgcaacactcatcgcgacccacatcgcaacactcatcacgactctcaagtccaatcatgagaatgcagatgtggtggtgccgaggacctcgccctcctgactacaaccaactggaaccagcagcaaccaatcagatctgataacaaaacctactattacgctgccacattagttgtgcttggttggtatgtactgggcatcatctcttttcattctgtcattctgtcgctgacatgcagtttttagtctccaagccttgtcactgaagatcctccagcttgcgagtctccccaatgttgcgaagactctggcttcaatgccatcaagagttctggatcaaggcctagtagggaccgcgtgtggtggtgggcaattatccggtttagaaccgttacgtattgcgtgtataattgcctattagtagttagttagcttttccgaaccggttgtcgccggtttattccctggtgtagtagccagtttctgtcacctctacactaaaaagcgctcatgtccaacatcccccagtgccgaggaaaagggcgatgactcacacgacctaatgcccataatcaccaaaaggaaggctccagatcaacaaacacgtttgccatctacaactcgtatgcaatggagtcccgtcaacacgtagtgttgcctccagaccggtatccagtcacaatcatcactctacgcgtcgatgcagggcaaaatgtccagaaggatgatgtcctgggtatttatgaataccaaggtacagtcatggtcaaggatcgcgaatctcaacaggaaaggccggtgcagaaaagagtgaaagaggaattgcgatcacagtggacaggcagaatcgataaagt

SEQ ID NO: 4384 - protein, 85 aa, Spizellomyces punctatus
MTLGSAAIRQPAFTFLIGVTLAFTAYGTVVWLRGGKAPPVTELGKLEQQGEVGLAGPPRVNLGPPLPRRSAAAEGPPDKARNPNA

SEQ ID NO: 4385 - DNA, 3474 bp, Spizellomyces punctatus
  source 1..3474: mol_type = other DNA
cattgcgtcgttactgggagtaaatttgtggagatgccgtgggccatccattcccggcaatgcgcacgagccatctgtaagattctcgctattctgcccctgggagatgtctccacatgatgccaaagccttggcgatgtcaagcaattacctggccttccgcatgcatgttgcgtaagctgttcaccgcccattacaaaacaggacccctggctgcaccggtacaagtaatctcgctctacgtgggcggattcagggttacggagcaattatccacgaaagaacgttccaaagggttttgatcgaaccttaccagtgctgtccggtatgcaccaaattacctttacccatgggattgcctcaagttacagtggtaaggtggaatgaaggctttgatgcatatgaccagggctttgtgcgtaagattgcgtaatggaaggcttacaggacggggcgagggggacctaacaaccatcatctgcagggttgatattgctgacctccccattactgacagaacgccattttattatagctgctgagggctgcttactatgaaacaccatattggttctcctccacggacgggacagctgctcccaaccaacctcatatgtcttttgaaattattaaaccttacggcaaaagtaaagtaatagatagtgagtgcaagggagatgtgacgtagaaaggtcgtggctagtttaagtcaaactcagggttgcgatctgcggaccgctcccccacgaaaccttcctcaccgggtcttgatcgaacgggtgtcttaccaaagttttttacttaatcgtatcgcctcatatgccatctcctagtaaaattgacgtaagagttcagcgggacagggattactatttggattttaaaccgtttcccatcataaatcggattccccccatcaacatctcttttgttgacacacgaatcactttagtcaattcccgcaacaaatccatgacgtgagtgtgtatttccaccccttctttcccagaatagcacacctaattgtccattgctagactcggatccgccgccattcgccagccagcgtttaccttcctcatcggggtcacgcttgcctttaccgcttacggtacggtggtctggttacgtggtgggaaggcaccccccgtcacggaattggggaagttggagcagcaaggcgaagttgggttggcagggccacccagggtgaatttaggtccacctctgccaagggtaggtattgtctttggaaattatcggatgtaaggatcatccttacgttacttggtccattacagcgaagtgctgccgctgagggacccccggacaaggctcgtaatcccaatgcctgagagctctttcgattcagaggcggatgcatttggaatgagaggttgagatatatgattactatcttgttgcattttgaaatatcgaatggcggtataccgactccacacttttattgattagtgtagaggtgacagaaactggcactagctactacaccagggaatgaaccagcgtaaactggctcggaaaagctaactaactactactaggcaattatacacacaatacgtaacggttctaaaccagataattgcccaccaccacacgcggtccctagtaggccttgatccagaacccttgatggcattgaagccagagtcttcacaacattggggagactcgcaagctggaggatcttcagtgacaaggcttggagactataaaaaactgcatgtcagcgacagaataatatgaaaagagatgatgccattggtacataccaaccaagctcaactaatgtggcagtataatagcagctttgttggttccgagtgattgttgctggttccagttggttgtagtcatcgggagggcgaggtcctcggcaccaccacatctgcattctcatgattggactgagtcgcgatgagagttgcgcagatggtttgagagtcaaggactggtgagccgatcacgcagcaatcatatcgcttgtaaagatgccatccatttacatgggtccttttatgtcgctacccggtcatcacaatgatccactgtcagcaatctgcattatctttcatcaatcaaattcctcttgacttgcatgtagatggaaagttgttgaaatacgcttcccccccgcaaattgaccggcattggtagtatgcatcgtggcttcctgttgcatcgagcgtctccattcctgcgattcttaaatttggtatcgccacaaacgtatatgtgagcaagtaaacgcctgttgatgacagcggtggggacaagttggctgaggcacgagaagccagaactcctgacaacccccgtttttttctgttgcgtttcgcaaagacaagacaacaacacgaactactccgttgttgaattattatctctgctgtgagacaaataaaaatgcactcagcaagctggaatgatcacaattcaagtaatgtaatgatcatcagtattatatattaaacaaaaacattcaaattacatgcctcagtagcacaatcaggtagtgcactcgcctcctaaacagaggttagtgagaggttgcgggttcgagtcccgtctgaggtgcttcgcgttttcgaaggattttttttgtcgttcttcgtctgcttcttgtccgtcattaccgcagcagtcgctaagttaacccctttccagagaaatttcagagaaggctcttgatgatggttcacctatagaacattcctctttttgccatgctcgacctcctcatgaaaaacggacatgtcaaacaactcgtgcagagtcccaaccagaatacaacagtgggtaccaccctgctcaagaatccttaatatctattctattctttcacatgatattcgcattgtataccaaaaggtacctttgtgggctcaaagagagaccattccaaaaaaaaaaaaggaagagaagaatgggggaagggcagaataggcattccccagcaataaaaaaaaggaaaaaaaagcctggggaatcgtcaaaatgtatacagaaccaaaccaaaaaaaaaaagacgaaagagaatcacggccacatgctcatcatgccttaacctcagtactactatttctcgtgtgacctccatccaaggggtcttgctctccgtcggttttcccattccgcaacaatcgctgttcttccctgatatcctcgacaacagcagcaaccacttgatcaatggggataatggtggtagatgccggtgcggatgatagcttggtgggtttggctgccgacccaggagcgaggggctcggctgcagcggcaacagtactcactactaaatgtccaaaatgtttggcaattttttcctgaagttcgagggccttgaaaggcttggccagccagtcgtgcatgccggcttgttcgcacttggctcgatcgtccgttgttgcagaggcggtgagtgctattataactatggatggtggcgcg

SEQ ID NO: 4386 - protein, 288 aa, Spizellomyces punctatus
MGSSAFINRNLQKSAILRAHSWLSLNLPPSVTKIIRMGCGTSTQRQNYPAQPVAVPTAIPAHPTESDPAKPGGPKAGSAVVLDKQATASAPDIKADAAGDGATDRQALELATSQPETEVAGENMQTGNNVQDQSKHGSVAALNQQHVPSASTNALDSAKSKAASTNALDKTASVTKSAAALSSAGGQGKTGSTVALNKSAKGSIPALTEQHVPAQKSMPALNSHTNSEVAGVASASGMSEVAVASIESKSRQDIAMGATGTTEQQGVAITVAQSGEVGTSTGGEEKGI

SEQ ID NO: 4387 - DNA, 612 bp, Spizellomyces punctatus
  source 1..612: mol_type = other DNA
aacacctgcgacttccgaattagtgtgggagttcaacgccggcatggatttctgggccgggacatgttgttcggtcaaggctggaatggaccccttcgcgctcttatttaatgctacagtagaaccagtcttcccttggcctccagcgctactgagggcagcggcggatttagtgacggaggcggttttgtccaacgcgttggtagatgcggctttgctcttcgctgagtcgagagcattggtggatgccgaaggtacgtgctgttggtttagcgcagcaacagatccgtgcttgctttggtcttggacgttgttccctgtttgcatgttctcgcctgccacctctgtctctggctgactagtggccaactcaagtgcttgtctatcggttgcgccatctccggcagcatccgctttgatgtctggggcacttgcggtggcctgtttatccaaaacaaccgcagatcctgcttttggaccaccaggtttagcggggtctgactccgtgggatgggcgggaattgctgtgggtacggccactggttgcgccgggtagttttgtcgttgggtggaggtgccgcagcccattctgatgatttttgtgacggaagg

SEQ ID NO: 4388 - DNA, 1094 bp, Spizellomyces punctatus
  source 1..1094: mol_type = other DNA
tatctgataattaatagttcagctcgtacgtcacacagggaatcgcgtggtatttcaggttctcacggtcttggttttactgtaccttgcactttggactcgtatcgttgagtgattcaacccaatgccactttccgcgcaatccgacactatggaagcgtacataggacgaacaagtcaccgtaaagaaggaagatattcgggtcctcctccggggacggctgcatccagccgatctacgactaccagaggaaacggagagagttactacattgcagctgttagcgaaagtcgtggcgttgcagccgaggttggcgttgcagccatggatctgcgaacgaatgagtgcccagtgtatcaagtataccacgacgtcccattgtttaagaccgcttaggcagcatactgatgcgctcacgacagttcgcggactcccaaatatatgtgaagacagtccacaggctttgcattttggatccagcagaggtaggagtgtgattgatccacaaataccatcttggaactgaacacagcaagtgaaaatctgagagcctgtaaaatctacgctagttagatgatttggaaacgtatccccgatgtcggtatggtgccggtatctaggaaatgcttcaatgcaagtgttggcattcgcttctagaattcatataagtcgcatatgtcgtgactcatgtcctttgacaggatcgacactgagtttcaacttggactcagaagtaccgtgtggggggagctcaagtgttgcgagggtgagaatagcatacgagatgcgctaacgtccatggtacagtaccggcacgacacgcggagaacggtgagaaaacttttgatgcgagtctggacgagagcagagaagaatgctgactcagcaaaaagtgtctctacattccaaccacctgcattctagaaagttgataccgcaagtttaaaaacaacatcaccggtgtattaggccaccgcaagcgcccaccttcgccatgcaggaactcaaagtgtccgacgtcttgcgccgtgcttccacatacagtttagagcaggcagccaaaggacttgcctcggcgacgcacgggttcgga

SEQ ID NO: 4389 - DNA, 1444 bp, Spizellomyces punctatus
  source 1..1444: mol_type = other DNA
cggaagattaagcgatagccaggaatgtgctctaagaatggcggacttttgaagatttctattgatgaatgcggaggaccccattcaccaatggccaacctcaaagttgattgaatgcagcacacacccttgaaatccctcaattgcttacgccatattgtgggaatatataaatagcaacctgtcgattggagccaagtgcatcgtgcacgtgacatcatacagtacagctaaagcagattagtgtgcgccatcacgtgcgtcacatgatcttcaaagatgtggacacggaattgaaatggatagaccatcacgtgaatcacgtgatggcgcacactatctctgctgtagctgtactgtactgtagtgtggaggtgattgaaaatggcattattatccagattaatccggttaatcatatcgcataatcagcacccccgtctatcgctcaaagcggtgaggcatgcatgctaatcggtgtggcatgctaatatgtttttttttaaaaaaaaactgaggtgaggcgcataccaaaggtctataaaaagggggccttttgctgtctcttccctctttcctctttacccatcctcgactcgcaaaccatctgcgcaaccctcatcgcgactcggtccaatcatgagaatgcagatgtggtggtgtcgaggacctcgtccgcccgacagcaacagcgatcagaaccagcagcaaccagttggatccgataacaaaactgctattatgctgccatatttgttgagcttggttggtatgtatcaagggcatttcttgcatttcttgtcatcgggtcatcttctgacatgcagttctagtctccaagccttcgttactgaaaatcctccggcttgtgagtctccctgacgatgttaactctcttgcgaagactctggcttcaatgtcaatcaagagttccggatcaaggcccagtaggaacgcgtgtggtggtgggcaattatccggtttagaaccgttacgtattgcgtgtataatggcctagtagtggttagttagcttttccgagccagtttacgctggttcactccctggtgtagtagctagtgccagtttctgtcacctctacactataacgataaacataaaatggccatctgatgactggaacatatctgcagttgccacatatcattccatatgaatctcatctccctcatctttccaacaagaatgggttaaggatcaatgctattactgctatactgctgcaatcacaggtatgtaatgtctttgtgaacttttccccactctcactatccagtttactattatcccaactttcgacaactgagctattgccaatacgccaaaaagttgagaatatatccgctagcatttacagagcatctgctcctaatgcacaattcatatgggcagtagaaatgtaatataatattatttattcttg

SEQ ID NO: 4390 - protein, 258 aa, Spizellomyces punctatus
MPKVYKRGPAPSFLFPLYPSSTLKASAQLSSRLGPIMRMQMWCRGPRPPDSNSDQNQQQPIGSVNKTAIMLPHLLSLVVSKPSLLKILRLASLPDDINSLAKTLASMSIKSSGSRPSRNGCGVQLVSFSEPVYAGSFPGVIAYPIRTSRTTNNLNAANDQSHHPNDMPYTKQDALYDLTTLTCLTTHLLLAPYTKVEESFHMHATHDISSGIPLSEYDHFKFPGVVPREFYGRIGVEFVFMAITCKWPDATNLLEMDF

SEQ ID NO: 4391 - DNA, 3142 bp, Spizellomyces punctatus
  variation 1..670: note = n is a, c, g, or t
  source 1..3142: mol_type = other DNA
nnnnnnnnnnnnnnnnnnnnnnnnnnnnnnnnnnnnnnnnnnnnnnnnnnnnnnnnnnnnnnnnnnnnnnnnnnnnnnnnnnnnnnnnnnnnnnnnnnnnnnnnnnnnnnnnnnnnnnnnnnnnnnnnnnnnnnnnnnnnnnnnnnnnnnnnnnnnnnnnnnnnnnnnnnnnnnnnnnnnnnnnnnnnnnnnnnnnnnnnnnnnnnnnnnnnnnnnnnnnnnnnnnnnnnnnnnnnnnnnnnnnnnnnnnnnnnnnnnnnnnnnnnnnnnnnnnnnnnnnnnnnnnnnnnnnnnnnnnnnnnnnnnnnnnnnnnnnnnnnnnnnnnnnnnnnnnnnnnnnnnnnnnnnnnnnnnnnnnnnnnnnnnnnnnnnnnnnnnnnnnnnnnnnnnnnnnnnnnnnnnnnnnnnnnnnnnnnnnnnnnnnnnnnnnnnnnnnnnnnnnnnnnnnnnnnnnnnnnnnnnnnnnnnnnnnnnnnnnnnnnnnnnnnnnnnnnnnnnnnnnnnnnnnnnnnnnnnnnnnnnnnnnnnnnnnnnnnnnnnnnnnnnnnnnnnnnnnnnnnnnnnnnnnnnnnnnnnnnnnnnnnnnnnnnnnnnnnnnnnnnnnnnnnnnnnnnnnnnnnnnnnnnnnnnnnnnnnnnnnnnnnnnnnnnnnnnnnnnnnnnnnnnnnnnctcatacgacaaatccaccccgcacaccgctttcccaaattggagttgaaacccctcttcgaatggtaccccaatgagatgctcatgaatacccctagaaatccatctcgagtaaatttgtcgcatcaggccatttgcacgtaatggccatgaaaacaaactcaacgccaatgcgcccataaaactcccgtggaaccacaccgggaaacttgaagtgatcatactcggataatggtataccagaagaaatgtcatgtgttgcatgcatgtggaaagattcttcgactttggtgtagggtgcgaggaggaggtgcgttgtgaggcatgttagtgttgttaaatcgtagagggcatcttgctttgtgtagggcatgtcgttgggatgatgagattggtcgttggccgcgttgaggttattggtagtgcggcttgtacggattgggtaagcgatctttcatgtcgatgtcaacatagtgtagaggtgacagaaactggcactagctactacaccagggaatgaaccagcgtaaactggctcggaaaagctaactaactgaactactaggcaaattatacacgcaatatgtaacggctattctaaatcggataattgcccaccaccacacccgttcctactgggccttgatccggaactcttgatcgacattgaagccagagtcttcgcaagagagttaatatcgtcagggagactcgcaagccggaggattttcagtaacgaaggcttggagactaaacaagtgcaagtcagccagatgacagaaatgacagaaatgccatcggtacataccaaccaagctcaacaaatgtggcagcataatagcagttttgttcacggatccaattggttgctgctggttctgatcgctgttgctgtcgggtggacgaggtcctcggcaccacatctgcattctcatgattggaccgagtcgcgatgagagttgcgcagatgctttgagagtcgaggatgggtaaagaggaaagaggaaagagggagcaggtccccttttatagacctttggcatgcgcctcaccgcagtttaaaagaaaaaacattacattagcatgccaccgcagtttggagaacattagcatgcctcaaccgctttgagcgatggggggttctgattatgcgatatgattaaccggattaatccggataatattggcactacagcattcacgtgatgctctgccaatctataccccagtgtactgtataatagactagaattctagaccaccacatgactcacgtgatgctcgatctttatctgcacatgctgtacaatcacctccacactatggatttcttttcaaaattccacattgcaaaatataaaagccaagaaagcgatcaataggtatgccttgttccgtatattttggagaataacgtttcattaacatgaatgtttctggaaatgtataaacacctcatgacactcgtaatggataacacatttggatttacatggatatcagtcatcccaaaacgttgaatcacaactcaaattcgtcaatggcaacgtatatatccatatgcgtattcttgcatgtcactattcaaaagtgcaagaaagaggatatcgcaaactgacaatcatatttgggtcgaaaaaaggatttctagtgcagatgtaaaggttggcctggtactaggttccaaagcccaacacattgtcatcaactgcgccttgaaaagcaaaaccacaatccataagcaccacacacatacgcagcgtctccaccaaaactagatcactcaccaaattccccggcacataccccggaattcccggcctcgcattctccaacaaaaccctgataccaatatgcatagaattcatatcctcataaggccagcccctagtagcaatctcatgcaacatgattccaaaagcatatacatcaacagcttttcgatttatggttgggtcgtacccgcgtaggatttcgggggctagccattcggcgttggagaggtagcggtttgattgggttgcgcgggggttgtagattggggaggttaggccgtagtcggttagtttgactgttccgtcgtccataagctggttttttgtaatgttagattttgtttttggtggaagtaggtaaacttggcttttctatgtaccatgacgttttgggatttgagattcccgtgcaggattggtggatcttgttcatgaaggaacgccatacctaatctcccagcaaaccaaatcaagaataaataaatagatcaaggtaccgcactctctactcccagacacacaaacacatcacgctcacctacctcgacacacaccaacagccatccccatcgcaacctcaggactcatatccacactcgcatcatgcaaaaaagtccacgcatcaccataaggaacaacctcagtcaacaccccaatattaggcggaacaacacaagcccccaaaataacaagtaaa

SEQ ID NO: 4392 - DNA, 637 bp, Spizellomyces punctatus
  source 1..637: mol_type = other DNA
cagctgcgactgggcaaaaccatatggacgagaccagttagcaccgtcggtcgaacgctgagttatggaacctcaacaataagacgcgattacgtgatctgaaccagccacagtaaatcacatgatttgcggttagttggaaggcaaccggggcgtgtggcggctctcgcgagagcttcgccaactgtcgaaacgagatttgacccaatcacccaatccgacgaaacctccagcaagcgcttctcgacattcccccgctgggcgcgacaagtttcgacggtcggtctttttactatccttaggtaagaatcgcgtcaagtctttaggatggcgttgtgggagcaatgtgcgggatgagcggtccatgtattatacgttcgtatatgttactttcctggaggtatctagtatacgttgcttactggctatcgccattgctaatcaacaaagattgacccagaaaaatgggacagacacttaatgagtttgcacatttcctccctgtttctgctttctaacttattcaagttgcagacagagacgcttgacgcatcagtatagttctaacaccatgggtgccatattttcccgactattttcccggctgtgggggtcaaaagaagttcggatattaatt

SEQ ID NO: 4393 - protein, 182 aa, Spizellomyces punctatus
MGAIFSRLFSRLWGSKEVRILILGLDGAGKTTILYRFQIGEVVTTIPTVGFNVETVTYKNIKFQVWDLGGQTSIRPYWRCYYANTDAIIYVVDSQDRDRVGTSKEELVAMLEEEELRDAALLVLANKQDMEGAMSHTEVSDALGLTSLRNRTWTIYKCSAKTGEGLTEALDWLVNVVSGGKK

SEQ ID NO: 4394 - protein, 182 aa, Spizellomyces punctatus; identical to SEQ ID NO: 4393

SEQ ID NO: 4395 - protein, 739 aa, Spizellomyces punctatus
MGFFAFAQLDEVYHRVKANALRNGVPGASTVLIFVSPDADALCALRILVNLLKSDCIAHKVVPVAGYTDLSEANEDHVEANEELRSIIMLNCGGLVDLTEMFSLSEEMTVYVCDSHRPLSLQGLFGHDQIMFLDDGDVDQMSDLREAVEELEFAETDSEADENAEEEGSDSEASASEGENEDPTEEDEVGEVDEKDDEHRKPGKRKKPPADEAMEIISPPTKKVRASERRRRRKQQQRLIAEYYAEGAYYGMSVAGIIYTMASQLGRASNDFVWLSIIGLSDQYLHDRIDQRRYLSQVETYKDEVARFNIRHGGGDENDDIDSLFGESATKSGPGSAIIRNADDHAIRCDDEFRLMLLRHWTLYESMYHSSYVATKLGIWKERGRQRLTNLLVKMGLPHKESQQRFTEMNITFKRSIRDKLSSVAPRYNMSEIIFPSFCKSFGYKGVVSAPDTVYALTALLDWGAEWITRHSAIAYSEGMRPVSSRLGRPGGGRDETSELGTGGLAGVGVGTRTGMAAVAMRTGDSIHDDGNKSDEDDEDLAEEEQERRKKEKQRAWVRNFYVAYDALDSFDILQQGIQLSMNFQRILVRTGVSVLEKKLTQTLRTFQLAVLTGEGLGSAIDGSGALTDENDFSLFGRSPAHLGRLAKFLMDAFREYRQKDLPLVIAAFNTVADAYLVIGFTGSTKGGVVRKNTFGPAFQRAAQRTNARIRHDSFETSVMEVRKEDLTDFLESLQLFMQ

SEQ ID NO: 4396 - DNA, 1067 bp, Spizellomyces punctatus
  source 1..1067: mol_type = other DNA
ggcaaacgctcttcgtaacggcgttcctggtgcatctaccgtgctcatctttgtcagtcccgacgctgacgctttgtgtgcactaagaatattggtggtgagtgggatcttcatgggaggcaaaaagactcttgctggacagcacccaggaattttcggttaaaggttgtggggaaggaggtcatagtggattcagacaacttctaatgagaaatggagctatcaaattcgtgaagctggaacctgaatgcgcgcgaactcgggacacgggttggactccctggttcagcatctgttggaggtttcttgaaggttccccttgtcgtgatatcttcagctaattgcgaacttcctctctcatagaatctcctaaaatccgactgtatagcgcataaggtggtgcccgtcgcggggtacacggatctcagtgaagccaatgaagatcacgtggaagctaatgaggaggtaaggcctgtcctcaccctcgttaacactactctcaaatgctcattattattctctgaagttgcgaagcatcataatgctaaactgtggaggattggtcgacctgacggagatgttcagcttatcagaggagatgactgtgtacgtctgcgattcgcatcgaccgttgagcttgcaaggcttgttcggacatgaccaggtacttttacacgtcaaacatatacttgcaagttttctcgtcatgatttaactcgattgaatagatcatgtttttggacgatggtgatgtcgatcagatgtccgatttacgggaagctgtagaggagctcgaggtagatttaaaacatgtgacgaccttgccgatcgatttctgaagcgttggatgtagttcgcagaaacagatagtgaagcggacgagaacgcggaggaagaaggatctgacagtgaagcaagtgccagtgaaggcgagaatgaagatccaacagaggaggatgaagttggggaagtggatgagaaggtgcgcaaatacaggaaaccctcccgagtagaatttcgtctcatattgcttggataacaactaggacgacgaacatcggaagcca

SEQ ID NO: 4397 - DNA, 1612 bp, Spizellomyces punctatus
  source 1..1612: mol_type = other DNA
cttggactcgatggcgccggaaaaactacgattctttaccgatttcaaattggagaagtcgtgacaacaatcccaacggtcgggtttaacgtggaaacagtgacatacaaaaacatcaaatttcaagtgtgggatctgggtggacaaacgtcaattcgaccatactggcgatgctactacgccaatacagatgcgattatctatgtggtggactcacaggatagagaccgggtgggaacaagtaaggaagagctggtagctatgttggaagaggaagagctaagagatgcagcgctgctggtattggcgaataagcaggatatggaaggagcgatgtcacatacagaggtttcagacgctttaggcttgacgagcctacggaacagaacgtggacgatctacaagtgtagtgctaagacgggggagggactaacagaagccttggattggctggtgaatgttgtatcaggagggaagaaatgattatcactttgagacaaataataatgtataggtgacagaaactggcactagctactacaccagggaataaaccagcgtaaactggctcgggaaaagctaactaagctactactaggcaattatacacgcaatacgtaacggttggttctaaccgtataattgcccaccaccacatcgcgtttctactgggccttgatccggaactgttgattgacattgaagtcagagtcatcgcatgagagttaatatcgtcagggagactcacaagccggaggattttcagtaatgaaggcttggagactaaacaagtgcaagtcagccagatgacagaaatgacaagaaatgccatcggtacataccaaccaagctcaacaaatgtggcagcataatagcagttttgttagcggatctgattggttgccgctggttctgatcgcggttgctgtcgggcagttgaggtcctcggcaccaccacatctgcattctcatgattggaccgagtcgcaatgagagttgcgatgtgggtcatgatgagcgtttgcgcagatggtttgagagtcgaggatgggtaaagaggaaagagggaagagacagcaaaaggccccctttttatagacctttggcatgtgcctcaccgcaggttggaggaaaaaaaaaacattacattagcatgccacagtgctttgattagcatgcatgcctcaccgctttgagggatagatgggggtgctgattatgcgatatgattaaccggattatccggataataatgggtcttcgtgccattttcaatcgcctccacactatgttgcttgtgttggaacacgttgactaaactgtgccactcttcattttgcctatttcggaatgtccagtcggcaaacgagtccagatggtcgcgagcaaacgaccaactctgttcttggtgaccgtttgaacgctccaaagttcttccaacatcttcgcgtcctttggcatcgctggtagcttggttctcactggcttggtttcgcctcttgctagtagccacatagcacagaagctacggggagaccttcggactagcgttgggcgggcaaatggggttctttgcgtttgcccagctggacgaggtttatcaccgcgtaaa

SEQ ID NO: 4398 - protein, 524 aa, Spizellomyces punctatus
MGGGDLNLKKSWHPATLRNQEKVWKKEREAEEERKKMDQLLKEKNEERQMMELQALSEAAGKVKKRTERLDWMYSSAGGGNKAVDEDREAYLLGKKRVDKLVEQGKTIQEIESSASFDRANVYGVTANTVRDTQAKIREDPLLAIKKREHASLQAVLNNPVELKKLKEAKSGKKDRGSKKDKKEKKHKREKKKRVRDEDSDSDSSQNTELRRAAKSTKVDIAVHGRENGRSNGHHNRRSRSRSFGRSTRRSSSVERNRYRRRSPSVSGGWFSRRSPSPARRGTFRRASPSASIERTSRPSPSPVRSRMWRRSPSGSIERPSRRSPSLPRERPRRKSPFRSPSPVGERGGRRSQPRDGRSFRSPPESSRPNHMSPRRRRSSPSPRPPVTDGKQHDTRQSPPTPSAESLSKTNTVLSTAHAEYEARKKALESERERRLAEMMNNAQEWDAARTKRVEEERRQDAEEHARDMDARMKRLERAGGAQGESFLRDLHRQTFSGESASAADMIRRNKAFAQRAGGFLSKS

SEQ ID NO: 4399 - DNA, 1161 bp, Spizellomyces punctatus
  source 1..1161: mol_type = other DNA
tcacgcgcatgctcttctgcatcctgtctacgctcttcctcaacgcgcttagtccgcgccgcgtcccattcctgagcattattcatcatctcagctaaccggcgttcacgttcgctctctaaggccttcttccgagcctcatactctgcatgagcggtacttagcacggtattcgttttggacaggctttcggcagatggcgttggaggtgattgacgggtatcatgctgtttgccatcggtaacaggtggacgtggagaaggtgaagagcgccgtcttcgcggcgacatatggtttggtcggctggactcaggaggtgatcgaaacgatctgccgtcccgtggttgggagcgtcttccaccacgttctcccacaggggatggtgatcggaatggtgacttccttctcggccgttctcttggcaatgatggagaacggcgggagggcctttcgatcgatccggaaggagatcgcctccacattctacttcttactggcgatggagaaggtcgtgatgttctctctatggatgcagagggagatgcccttctgaatgtccctctcctcgcaggtgagggggaacgtcgcgaaaaccacccgccggaaaccgaaggagaacgtcttctatatcgattacgttctacggacgaagatcgtcttgtcgagcgcccaaatgaccgagagcgggatcgtcggttatgatgaccattgcttcggccgttctctcggccgtgcacagcaatgtcaactttcgtgcttttagcagccctacgcagttcagtgttttgactggaatcactatcgctgtcttcgtccctcacgcgcttctttttctctctcttgtgttttttttctttcttgtccttcttgcttcctctgtccttttttccagacttggcctcttttagttttttcaattcaacggggttgttgaggacagcttgcaacgacgcatgctcgcgctttttgatcgctagtaaggggtcctcacgaatttttgcctgcgtgtcacgcacggtgtttgcggtaaccccgtacacattcgctcggtcgaatgaagcgctagattcgatctcttgaatagttttcccctgctcaaccaacttgtcgacccgctttttaccgagcaagtatgcttctcgatcctcatcgactgccttg

SEQ ID NO: 4400 - protein, 259 aa, Spizellomyces punctatus
MLSALNSHPLEFYANMGNLLGKDKSKGPKITSKDKAILDLKIQRDKLRQYQKKIQVILSREVEVAKHHLRSGDQGRALLALKKKKYQEHLLAETDQQLLNLEQLTSQIEFALVEQDVVKGLQQGNEILKQIHQEMSLDAVQKLMDDTADAIAYQAEIDELISGKISPEDEEEIMAQLDALEAEEIAARLPDVPAAKGKGSEATQSVSANKLPIDLNDLPPVPTKELPRLEEPDEAAEHAKISKIAKARAEPKLEEPLMA

SEQ ID NO: 4401 - DNA, 1105 bp, Spizellomyces punctatus
  source 1..1105: mol_type = other DNA
aaatcaaaagggccaaagataacttcaaaggacaaggccattttggacctgaaaatacaacgagacaaactacgacaatatcaaaaaaaggtggacgttggataccatcgcgcctttctcgaaatgtgtcaaatggcaactttgagtgaacgtttctcgctctggcatcgtagattcaggtcattctctcccgggaagtggaagttgcgaagcatcatcttcgttctggagatcaagggcgagctttattggccctcaaaaagaagaagtaccaggagcacctgctggcagaaaccgatcagcagcttctcaacctagaacaattggtactgatttctcaatactctactcaaagccgtcagccactcatctaattttcattgtacagacgagccagattgagtttgcgctggttgaacaagatgtcgtcaagggactccagcaaggaaatgaaattcttaaacaaatacatcaagaaatgtcattggatgctgttcagaagctaatggacgatacagctgatgcgattgcctatcaagcggtaatctgcaatttgaaatctttacccccagtggtaggctgacctttcgcccacttgcaataggaaattgatgagttgattagtggaaaaatatctcccgaggatgaggaggaaatcatggcacagctggatgcattagaggcagaagaggtacttccgccttattttttgcttactgtatccgcttgatcgtttggttcattgcctccatggcatgcattcaattgcagatagcagcaaggttgcccgatgtcccagcggcgaaaggcaagggatcagaagccacacaatccgtttcggctaataaactgcccattgatttgaatgacctccccccagtccctacaaaggagttacccaggttggaagagccagacgaaggtacgtctcgacatttctgataaatctggtgatagaatgaggtagttattattgacattttatagcggcggaacatgcgaagatatccaaaattgctaaggcgcgagctgaaccgaaattggaagagccattaatggcatagcgagatcaaatctcaatctgtattacacaacaaaaaaaaac

SEQ ID NO: 4402 - DNA, 1630 bp, Spizellomyces punctatus
  source 1..1630: mol_type = other DNA
tttccacctccggctgaagaatacatccagtcaagtctctccgtgcgtttcttgactttcccggcggcctccgatagcgcttggagctccatcatttgccgttcttcgtttttctctttcagaagttgatccatcttcttgcgctcctcctccgcttcccgttcctttttccataccttctcctggttccgaagggttgcgggatgccatgatttcttcaaattctggaaacaaaaaaaggaaacggatgagcgacagctagactgtaaggaagcacccgtccttacgcaccaagtctcctcctcccatcttggcaagttactgattgtcaccaaccagaggctgatgattcaagggcagggactcaaggatcaggtagacgggatggtgtgggactatacctttgagcacgcgcagtcttgttgaactttcactgctgctaaacctttctggtcacgtgcatttgcatccagttcatagtgtggaggcgattgaaaatggcactaggacccattattatccggattaatccggttaatcatatcgcataatcagaacccccctctatcgctcagattggtgtggcatgtattgtaatgtttttttttttttctgcggtgaggcgcatgccaaaggtctataaaaggggggccttttccctctttcctctttacccatcctcgactcgaagcatctgcgcaacgctcattgcgacccacacaacctcatcgtgactcggtcaaccatgagaatgcagatgtggtggtgccgaggacctcgccctcccgacagcaacaacggacagaaccagcagcaaccagttggatctgttgacaaacttactattatgttgccacatttgttgagcttggttggtatgtaccgatggcttttcttgcatttcttgtcatcgggtcacctcgctgacatgcagtttttttagtctccaagcctttgtcactgaaaatccaccagcttgtgacgctgcccagtcgattcgctcctggatgcaagagtctggcttcaatgccatcaagagttctggatcaaggcctagtagggaccgtgtgtggtggtgggcaattatccggttagaaccaaccgttacagtattgcgtgtataattgtctagtagtagcttagcttttccgaaccggttgtcgccggtttattccctggtgtagtagctagtgccagtttctgtcacccctacactaaacttgcctctcaatggaactttgcccgcattgttattgaaggccacatctgtacacatgtaaatatgaggttgaataatacgatctggcgtaagttcagggcggcgaggaggaaaacatgcatcgattctgtccagtgtgcttgccaattgaacaagtcgtagtcgagtgagcatactcacaggcgttaccaatgatttaccaataagagtttcctccgagagctatctgcaggttaaaaaaccgataacttctgccgtctatctcttggaaagctggtgctcttttccgtccaatttacaaacagatgtggaattgagtcatgatgactaagccaggccaccatgctgtcagctctcaacagtcacccgctcgagttttacgccaacatgggcaacttactgggaaaggac

SEQ ID NO: 4403 - DNA, 986 bp, Spizellomyces punctatus
  source 1..986: mol_type = other DNA
cgctctctttaagagtctgtggatttccttctgatgtatccgtgccaagacttcgtacctatgcaagtaatgtcttttgtggaagaacagcaacaagaggacaaggaaggtggagggtggatttggatttccactggacaaatctccaccccgtctcgtgcatgagtcataggtatgtaatacacaaagtcaccaactgggaagcgctacggggggcttggcacatttcgtttcaacaaaagcacagcccacagctcacgcagatgtttgctttgggattgtgggattgaatgggaaagaagacggccaacgtccattttgctgtggaaagaaggaccacatcgtttgctagtccagatctataagcttacgagtcttcgccacgtactgattgcctagcattctgtgattccagtttatgtcacatcctctacccaaagggttcaaaactagtggtgaattgcaaagtccataaggcaactcagctgccaaactcatctttcattgagacacttggcgtggttttcgtggcatggagagtaaaaagaatgatagatgccagttgagttctgccagtttgtacatcggcacctaaaacaaccgcgcttctggagatggatggcatgggctgtgctgctacgaaaatgctgaagacgcaatgcaagtttccacatagatgccaccttgccgggcaacgcctcacatacttgcgcgaataccgcatgaagaagccgggcttgcaggctgcgctttgccatcgcccttattcacatcactctgctaaaggcaggttcgctacggcagcaagcactttgctaaggcagattcatatcactctgctaaaggcacattcacttcgagtggtactcgatgcacaccaatcactctgctacggcagattcacttcaagtggtaactcggagcacaccaactgccacggtagggccctcaccaccgagtggtactcggtgcacaccaatcccatg

SEQ ID NO: 4404 - DNA, 1043 bp, Spizellomyces punctatus
  source 1..1043: mol_type = other DNA
ggtcgagagagggtattttttgtgttttgaatgtgatggtgtccaattttacagcggccctttggtattgctgtgctgcaagtatgcacgaattaccctgtcatgatgtacccaacatttaatgaaattcggttccctcagctcgcttaaactcaggcgaactggcggcaaaaaaagaaacagcgataaatcaaaggggaaaggtgctactagcgacgcttcatcagcaccctccgatgatacttccacaaaccagccggaagaactgagaaccactacagctcttgaaccggaaaagcaaaaaaggccgtcaacccaaaagtgggcaaaagaactcaaaaggcaaagaaaatatcataggaaaagacgtgtttgatgacaaaaaaaaggaggagcaggaaccagaagaaccagatgttagtttgtgcatcagaatgagattgtatatgagcagtcgaagtgattatggtacagtttccacaagctacaaggcaccaccagccgagtcttccggtgctctatcctctcgtacttcactatgttgtgtatgatccggtctgctccatttgtggttcatctccgttcttaatttccattctgtcattgatgtcaagcttatccatttcatttttaggttcctcactgcagtctatccgctgtatatcgtgcgcattctcatcatgagtttcgtttgttgtcggtatctgctcattgtcagccgcactctcaggcttactccgtttcgtctcttcctccaaaatgttctttaaggccttccttattgccgctacatcatttaggaggccccaatgtcctactaaacttctgacttccgaaaacgtaaatcctaatggcatacgcatatcttccccgctaacaatcccatccccgggcagaaagcgacatggccacatgagtttaatttcgcgctttattcctaacggtgtttgaaccttacgaacagaggagcgaatacgagttggtgtagggaattttgtagaggttaccgtggcgaatgggggatatgactgatcgggattgtg

SEQ ID NO: 4405 - DNA, 1536 bp, Spizellomyces punctatus
  source 1..1536: mol_type = other DNA
gtttgcgagctgaacagcaaccagcgttgacccgttataacattgaaagaatggggtatttcgctacgacaagtagctgctcataagttgtctcaaaacgttcacagaaaaatgactaggctcggtataagcgctttgcagtcgaagcgtacaaggccctcaacagattttcacattgtgcagtgctccatgttagcaagtagaagaaaataatgttgcggcacgagtttgtgcagcaaaactcacagctgtttatgtaccgtcctttcatgatcaaaatctgcgcatgaaaacagacaaggattaaatgatgtacgaagtatttcttcttggcggcgatacgaaaagagagaaatgacgcctgtaggccatgaattcaaaagagaaataggggagttctgatgacagaattgcctttgatcgctttgagcatagtgtggaggtgatggaaaatggcactaggacccattattatccggataatccggttaatcatatcgaataatcagaaccccctctatcgctcaaagcgctgtggcatgcatgtaatgctttttttttaaactgcggtgaggcgcatgccaaaggtctataaaaggggggccttttccctctttcctctttacccatcctcgactcgcaagcatctgcccaacgctcatcgcgacccacattgcaacctcatagtgacccacattgcaacctcattgcgactcggtcaatcatgagcatgcagatgtggtggtgtcgaggacctcgtccgcccgacagcaacaatggccagaaccagcagcaaccagttggatctgttgacaaacctactattatgctgccacatttgttgagcttggttggtatgtaccgatggcatcatttcttatcatctggtcatcttctgacaggcagttctagtctccaagccttcgttactgaacatcctccggcttgcgagtctccctgacgatattaactctcttgcgacgactctggcttcaatgtcgatcaagagttccagatcaaggcccagtaggaacgcgtgtggtggtgggcaattatccggtttagaaccgttacgtattgcgtgtataattgcctagtagtagttagttagcttttccgaaccggttctcgccggttcattccctggtgtagtagctaggccagtttctgtcacctctacactatcaaatgtcatttgaaatcctgagccattcgtttccgtgggtactatgccaccaaacgggacggctggttgcccgcatcttagttgataaagtcaatgtcaacgctaagtgccgcttctccactgagcagtgcttcacagatattttcagccgttgattattagttttgtttgggatgctcttgcttctgtgagctcatcgggtcaagtctttctgatctagatgagtatatttaaaaatgatgtatttactgtatcctcagcaatcaatatggggaattagctcaaatggtagagcgctcgcttagcatgcgagaggcacggggatcgataccccgattctccaatcgcgc

SEQ ID NO: 4406 - DNA, 2466 bp, Spizellomyces punctatus
  source 1..2466: mol_type = other DNA
ttttcctttcggaaaaccccaacctgaacttgatttccagcctttcaccaacaaaacctaaggtggacgttagcaaggagccgaccactagacacagaacactgtaccttatccaaacgctcgttgaggatgattgctccacatactggcacacggactttgtactccataaagttttgaaaggctttctcgtgatcgtgagcccatcgatggaggagtggacagtgccgaaaaaactgggcgcaaaagttttttaaggaaaatgaaggcagtcgcgggttctcttcgcgaacgaagtcctcgtaaaaccaatgagcttgctctatttgaaaacatattctttcaaccgacgctagttcttcttctggaatgttaatgatgaaacggctgagagagggcggaagtcggtgtgagctacaaacatccgacgcatggccaaaaagaatactgtgcaaaattccagctatcatctagtttccaccatcgctgtacctttgcagatcgtccaaaacttcttggaacgtcaggtcctgaaatgacataatttgtcgtggggtaaaagggagcttttaacactagctcacacacacaagattcaatgtccattatggcacgtgatccgccgtgtgtaagccaccttcccccgcatatcgataacactaggacccattattatccggattaatccggttaatcatatcgcataatcagaacccccatctattgctcaaagcggtgtggcatgctaatgtaactttttttttaaactgcggtgaggcacatgttgaaggtctataaaaggggggcctttgctgtctcttccctctttcctctttacccatccttgactctcaaaccatctgcgcaactctcatcgcgagtccatcatgagaatgcagatgtggtggtgccgaggaccttgccctcccgactacaaccaactggaaccagcaacaatcactcggaaccaacaaagctgctattatgctgccacattagttgagcttggttggtatgtgctgattgcatcatttcattctgttattcatctcgctgacatgcagttttttatagtctccaagtcttgtcactgaacatcctccagcttgcgagtctccccaatgttgtgaagactctggcttcaatgccatcaagagttctggatcaaggcttagtagggaccgtgtgtggtggtgggcaattatccggttagaaccaaccgttacgtattgcgtgtataattgcctagtagtagttagatagcttttccgaaccggttgtcgccggtttattccctggtgtagtagctagtgccagtttctgtcacctctacactatattttacaatgtcaccaacgatacaatgagctatatacatgagctgcttccaatcaaaccagaatcaaagccacagcaacgccagccaagctcaggccagcatttctaactaaggtcgaaccagcagactttggcgcagttgaagatccagtattggttgctgaggaagaagaggtcttgagcaaaacagtccattcgctgtttgatttgacgctcgcactcgttgaggccgtcttgttttcatcggcatcaaatttcgaggtcttttcatcgaccatccaagcaccgttctaaatcgacaaatgttaaaatgtgattggacgaattatgtagacacaaatagtgttacctgtacgaaagccaatctagtatccattaatttggcacctgcaccaccagcagcggtcacagctgcagcgctgactgcaaactcaatcttggcacttgcaccagcagcgagagcagtacgataggttactttccaggagttcttggcgagtaatttgaacccggatgggactgtggatatggatggtgtaccagatgttacggtctaaaaattgaaattataggttattagcacatacaggaaacagataaagcaaatagtaaatttgacaaccaaccactgtatttgccacggtcgaattgacatctaactcaaacccatcagggtaagttacatcaactttcttgccagctacgagagtaacaggagtgtttagtgtggcattcacgcgcacaccatccttgtcgtcgtctccttcctccttctcttgacgtgcgaaaagcacttgatttgtgcgtgaaaattgagttaccgccgcgatgtcttggctaggagttacggctgcggcggcagcagagatgccgagaagcatcaaggcaaaagtagaagagaagatcattttaaccatgactaagaaggcgatggcaagaaaagcaagaagattggaggcaaggtgcccagctgagtctccttttatagaccatttctgttgccccttgtcctcttcagcaatggatatatcggctgttgccaagataatttgcatacatagtctgaggtatcatgtcaattcacaagggtaggtagcttggatgtttggggtggctttacaagtaagt

SEQ ID NO: 4407 - DNA, 1076 bp, Spizellomyces punctatus
  source 1..1076: mol_type = other DNA
ttgaacagcccgggggggaaaaggcaacctgtcacttttccccgcgttgattttttcatacgcaactcatactcacagacgtcactcgcggcaactggccatgaacaaaagaaaaaaaaacatgcaatgaaatggctatgtttttctgccttggtttttgattttacgttttttttggcttgtccattagcgcgtgagtgtgatctcacccttggcttcttgattacgcattactcacacgaacggaccttttggattatacctttatccttctcctctgttcgtcccctaggaaggaatttcattgctttctgtcaaaatatccaaaaagcaactgtcgacatttaggagcggataatcaagaagaaagtaaaaatctaacgtcttttcgatctgtcaactttgggtaagttgctttgttttgttttccacgcgcgtcaaatcgccctggtctttgcgacccaaaggatggtcgttcatcaaagggtgaaacagctgcggggggattgggtgccatccaccacgcttcgtcgctcacgctcccagactttcttgcagcacagcatggtcaaccgctggtccgttctcccgggaggaacgccaaaggcccgcaacgctatcgctcccgtcgaatccagtccctcccttacacagtctgactttgaaaagttgacgcgcatctacgcgcttgtcgctcaccgagctcgccgtctcgccatcctccatcgccataaagacaacaaggccctcgtcacatcctaccaggaactcgtcatcgactgtcactccttgctcgccctcgtagaagaacggtatttcccgtcgcgtaccgaaaagggtgggcatcagtttgcaacatggtcctctccgtctgggcatcatgcgaacgcaccaagacctgcgagcgatcttaaatttcctggagcaaaacagttggccttgattcaagcggttggaacattaaaggatgcattaaatactttgtcgcgtaccatccggcggatatcatctggtacaccaccgccaggaagcgagagcaccgcaaaaggtgaacaagaccctctcgagcgggatct

SEQ ID NO: 4408 - DNA, 1681 bp, Spizellomyces punctatus
  source 1..1681: mol_type = other DNA
ttaatggagggctttgtgatgtctctttgcgtatatggatattcgcaacgggtgtccagagcacagaaattatgttctactttcatggtaaaccaatcagggttctcttggcgcatatggatttgttctgacggtggaggattctgcaacggtgtcagaacattggaaattcttgttctaaatcaatccccattcaaccgtggtagcgtcactctcacacgatcacaaaggccgaaatttgaaagttgaatcatcttccccagtcccatttagccacggacaatgcgaaccatctctatccctgagggagccctagagcaatggtgtgaacttgaattacttgccaagagcatgtaatgtccaatttccaacaaatctatttacgttgccaagaccgaggcggagtgggagtggttgattatctatcagcccgaacctaatcgacattctcatctgttggaaaagccgatacgcaaatgtatctctggctttcagtgtcgacatgactggccaacatagtgtggaggtgattgaaaatggcactaggacccattattatccggataatccggttaatcatatcgaataatcagaaccccctctatcgctcaaagcggtgtggcatgcatgtaatgttttttttttaaactgcggtgaggcgcatgccaaaggtctataaaaggggggccttttccctctttcctctttacccatcctcgactcacaagcatctgcccaacgctcatcgcaacccacattgcaacctcatagtgacccacattgcaacctcattgcgactcggtcaatcatgagcatgcagatgtggtggtgtcgaggacctcgtccgcccgacagcaacaacggccagaaccagcagcaaccagttggatctgttgacaaacctactattatgctgccacatttgttgagcttggttggtatgtaccgatggcatcatttcttatcatctggtcatcttctgacatgcagttctagtctccaagccttcgttactgaacatcctccggcttgcgagtctccctgacgatattaactctcttgcgacgactctcgcttcaatgtcgatcaagagttgcggatcaaggcccagtaggaacgcgtgtggtggtgggcaattatccggttagaaccaaccgttacggattgcgtgtataattgcctagtagttagttagttagcttttccaaaccggttgtcgccggtttattccctggtgtagtagctagtgccattttctgtcacctctacactacaaagaaatgatacgtgtgcttagatcagcaagccccagtggcgcatattaagccacgcttaagtcgactaagcctatgacgcaatgtgcattaattgtttaattgaggtgagttgtgtctttttttgtactgcgcaaaaaaggccctccgagaacatggaataaaatgtaggttcgatcgatgcccatgtgaagagtgtgaaatatggattagagatggctatgaaagatagatgtggatatgagattagtgcaatgcaaatgttgcatggccaatgtgcaatggatatgtttaatcgcaggatagttctagatacgaagatgtcatgattgcgttggggggggggggggggaaggaagcacaggaaggaaaatcatttccccttttactattgaaagtgtgtcaat

SEQ ID NO: 4409 - protein, 248 aa, Spizellomyces punctatus
MEFNLTLKTPYRRFMTTDRFRITASQGFARIQHTRYDQDALGVVVPIGGDPPPTPTTASANLVVDSEVLVPDQNRKLGTEITYITTGALTSYVLLLAGSQTCIDREVTLELVRTSSKTSILKTIMSLSNNTAPNPEVWSKHRDWHLRTFGLGTDVQPTPQEVNVRGRLARGQFLADVDGFMSVAKSFEEVEQFLERTVDRYVKVFRSVLDKQDDGPLSLKQLAYASCLARDRREIDGMVDEGQMGPVF

SEQ ID NO: 4410 - DNA, 1122 bp, Spizellomyces punctatus
  source 1..1122: mol_type = other DNA
ccaatcttgcccagtctgacattcctgactggtccttggctgaagcgggtattacctacaacctggcccagccgccacttacaactccggaaatctattcgaagatttggcccaaatctcctatctctgttgcacagcatgttaaaacgccttcgctccttatgctaggagagaatgatcggcgtgtaccaccttacgagggaatgaactggtactactacctgaaagggcgaggcggagttgatattaggtatgtgatttaccggttgctgctgtttttacaccgatctgcagttgatcgctaaagtaccatggtagggtaatgacatatcccgataatggacacgctttagacggtgtggaagctgagagatttggttttgaggctatagctgaatttttggtagagtttatagggataaaatagataggacggttaagtaaataagggcactcgtgaatgtagaggtcatgacaacggaggaagcaagtaaatgctgaagtgcacggccgctgataatagttgagtctgtagcccatgctggctaataagcctgatgtctgacatgtgcatgatcagcttacctaatactaatcatagtagtctcagaggcccctttcaacgttggccttctgcttttattcacgtacccagtgcaattagcggcagaaaactcggctcagttgggagtagactactaaccaacgtgcccactatggagtttaacttgacactgaaaacgccctatcggcgctttatgacgaccgaccggttccggataactgcttcccaaggcttcgcccgaattcaacacacacgttacgaccaagatgcactgggagttgtcgtcccaataggtggagacccaccgcccactccaaccaccgctagcgccaacctcgttgtcgacagtgaagtcctcgttccagaccaaaaccgcaaactcggtaccgaaattacttatatcaccacaggtgccctcacatcctacgtccttctcttggcaggatcgcaaacatgtattgaccgcgaagtaacccttgaactggtccggacatcgtccaaaacgtcaatactaaaaacgataatgtcgctgtccaacaacaccgcacctaatccgg

SEQ ID NO: 4411 - protein, 362 aa, Spizellomyces punctatus
MVSLAVVTVLGVIMGVLSAYLYPTGRALYSIYQVGNNLGDVGTDGWKVLDDPVLKGCGAAAIYQPTGQVFLACSESLPGSYKWFPPFSRVHEQSAGNKDANIVVLDMKTSKPTLQNTKLHSPPPFSISVTPHPTNSSSLILMTLTSQRTIEIFSHTLTTTQFVHLETIPWDEIGLTRPGGIAAVGEKSFYVTDQALIGTNGRVVFRGEDGTTRVATEGLTYPTDIAASSTSIYVVDPSGPHVLIYERKQNNRLRLLETIEVPIWGEQISVDPESGAVYVSGIMDVVKAGRALLNKEQGTPFAVMKVVNNTAQDRYYGKKFKSKVVFADTSLSMYTHAAVGVHPSSSRSFISGNGVRVIDKVL

SEQ ID NO: 4412 - DNA, 762 bp, Spizellomyces punctatus
  source 1..762: mol_type = other DNA
taccaacctactgggcaggttttcttgggtatgtctgagcgcagctaaactacggtcaattttcgaatgtagtttggtgctcattgaagtagcctgtagtgaaagcctcccagggagctacaaatggttcccaccgttctctagagttcacgaacagtctgctgggaataaggatgcgaatattgttgtgcttgatatgaaggtgcgttctcctttatgcggtgatctgcgcaaccatcaactgattttacctagtagacatccaaacccacccttcaaaacacgaaattgcactcccctccccccttctccataagcgtaacacctcacccaaccaactcctcctccctcatcctcatgaccctcactagtcagcgtacaatcgaaatcttctctcacaccttgactaccacccaattcgttcatttggaaaccattccatgggacgagatcggtcttacgcggcctgggggaatcgccgctgttggtgaaaaaagcttttatgtgacagatcaggcactaattggaacaaatggccgtgtggtgtttcggggtgaagatggtacgacgaggtcggtttcttctagttgatgtttatttatgcatcgtcgacttattcacgtatgcttccagagtggcaacagaaggactcacctatccaacagatattgcggcctcttccacaagcatatacgtagtagacccatccggtccccatgtccttatttacgaacgtaaacagaacaatcggttacggctgct

SEQ ID NO: 4413 - DNA, 1681 bp, Spizellomyces punctatus
  source 1..1681: mol_type = other DNA
aagtttggtccaagcatcgggactggcatttgagaacgtttgggctaggaacggatgtacaacctacgccacaggaagttaatgtccgaggacggttggctcgagggcaatttttggcggatgtagatggatttatgagtgtcgccaagagttttgaggaggtacgtagcgtggacatcatgtctgtgtatgctattacgtgcatcttgtctcaatatcctggcatcttacttttgttttaggtagagcagtttctggaacgcacagttgatcggtatgtcaaagtcttccggtccgtgctagataagcaagatgatgggccactaagtttgaagcaattggcgtatgcatcgtgcctggcgcgggatcgccgggaaattgacggtatggtggatgagggacaaatgggacctgtcttttgaatattttatcggcgtaagaatagaataatttggggtgggtatgaacatgggcagaatatagtgtggaggtgattgaaaatggcactaagacccattattatccggataatccagttaatcatatcgcataatcagcaccccctctatcgctcaaaacggtgtggcatgctaatgtaatgtttttttttttttaaactgcggtgaggcgcatgccaaaggtctataaaagagacctgctccctctttcctctttacccatcctcgactctcaaaccatctgtgcaatcatcacaacccacatcgcaaccctcatcgcgactcggtcaaccatgagaatgcagatgtggtggtgccgaggacctcaccctcccgatgactacaaccaactggaaccagcaacaatcactcggaaccaacaaagctgctattatactgccacattagttgagcttggttggtatgtactgattgcatcattttatttcttgtcattgggtcatcttctgacatgcagtttttagtctccaagccttgtcactgaacatcctccagcttgtgatgctgcccagtcgattcgctcctggatgcaagagtctggcttcaatgccatcaagagttctggatcaaggcctagtaaggaccgtgtgtggtggtgggcaattatccggttagaaccaaccgttacgtattgcgtgtataattgcctagtagtagcttagttggcttttccgaaccagttgtcgctggtttattccctggtgtagtagctagtgccattttctgtcacctctacactaaataaaaagggggacatatgggcttccctgaatgacactgatcacgtgcggaatgatctgtccgcaggtcagcacagctgtcctcctatctttgaacacatcttcctcatctcagacccaaaaacccggcccacaatggtgtccttagcggttgtcacggttctcggagtgattatgggcgttttgagcgcgtacttgtacccaactggtatgggatctacaaagtgaacacaatgcgccaaggttgacagtccaaaactctgatacaggcagagcattgtacagcatttaccaggttggaaacaacctcggagacgttggaacggacggttggaaggtgttggatggtatgctgctgccttgtaaactcgtgggccttggtcaatcaccgcactgactaactatcctggtgtgacgggtattcaagatcctgttctgaaagggtgtggagcagcagcaatt

SEQ ID NO: 4414 - DNA, 1161 bp, Spizellomyces punctatus
  source 1..1161: mol_type = other DNA
cgtcccatttttctagaagacgatgagacaatgtgtgcattgtctagatgtgtcgcccttagaaagagttttgggtgcggggctctggtgtgacagcggtctcgcccaacaacctgcggcgaacttttcgtcccgcctgcccgacaaaagtcacgctgtcacatgggccagacctactttaattgtttttgttttgttttttggcattttttttgccatcctttgatggagagaaccttgcagatatataactcttattaacgacgtcctgttctgggttatcgaaccaccgtcgttgaatcccagatcgttgcgttctttgctgaccgaccagatgtaccgtgtgatcttcatcgcggttaagatcctccctaatccttcagcattagggcagttaacgttaaccgatacaatacgggacaatgtagtggatcgtttcgaaatcccttgtagttttgaaagtgtaaaaggacgacctagggacggcttccaggatccatccatgctcgtgatctaaaccagcaagaccacaacaatttggttctgcgcccacgtgagcaatttatcgtccgctccaaggtattaccgatttgtgaactcgtattctgcatgttcggcaacaaggataccatgaggcacagctcatcgtgtcgacatacaagtcttcatttgattagggtgcgcgactacccaaagtgaacattaaaggcataattgcagctccttaattaccttcagccccctagcagacaatgctacacaacaacacagaatcaaagagtctatgaaactcggtcaaagaacgttctgcaaaatcgatgcggtctacagtatttttgtcgtggcctgtaccaaggcgcgtaaatgatgctgtcggaggcctcggaggatcccgccgttcgaaaatcttttctgggggaagtttcgtttagaaaagtgccaaggaacgctgacatgtgacacgccgacacacgtggcttgttcagggggttgagcctatcgagctaaaaagatgagcgaaacagataagagatcgtcgacaatccacaagctgcgttgactggcgtccaacggaaattcccgactggaggttcacagatttctgaacagaactgcactttgcgtcgtatggaccataactgctgtctttaaatgtaacgg

SEQ ID NO: 4415 - DNA, 765 bp, Spizellomyces punctatus
  source 1..765: mol_type = other DNA
ccacccaacgccaaaggtgattgcccgtaaacgtatatagcgtcaaaggtcactgcaattgcaaagtacgaattgcttggcatgctcacggtaactatttgtgctcattctgtgatgatcgcagttgtattagcgagtgagttttttgtcgcccctgaaccatttacacttgcaatcggcgagggatagcgtgatcgtgagacgttttaaagggattgcgcaaacgcgcggacccctcatggtgaagctccgtgttcctcctgggtgtgatcggctgtctccgtgcgaggtcggcggaacttggtcctcggtcctttgtcagccaacgactcggacaaaccccgccggtggtgttccacatgcgacggtctgtgcacaaaatcgttatcaaatcgacgcgatgtgatcatccatccatctgctcatcgtgattgcgtcgcgtaagctcttggttgaagaaactggcgcggaacacttccacgtacctcctgctatgtgccttctggcaaatattctgataagaccagagtcgtttttgctctgctacgggaacaacactactcaagttagtcaggatagaaaaccatgaatgctcgtcagtgatcagagaagttaatagatagcacattgccccattgcgatgggttccccacgtcattaacaccgatcacacaccaaatctggaaaagatgtagcactctgggattttcgcaatgatcatgtttggccatacataaaaggtcgatttgggcaagtgcgttcccc

SEQ ID NO: 4416 - DNA, 1630 bp, Spizellomyces punctatus
  source 1..1630: mol_type = other DNA
tgctagcacgtatcactgctacgacagactccgctcctcgttacagtgatggactgctgcactttctgtgctgatcgggtcagagtgagaagcaagcacaattagggattctaatacttccatttgaaatgcgttgggatgaaaaggaagcgcatcaaggatgtaacaggacagaaacattcatcgaccatcacaattgagagggaagaatgcattttttatattacaggaaaacgcaaattgcgaatatgcaagttaacgaggatatcagtggaaaatgcttcaacgttgtataagctcagcagtggttggatttacatgattccatccatttcaacagagaagtaattcgaaccactcgagttgcacagaacttcatatgtgattgcctcaatagtgtagaggtgacagaaactggcactagctactacaccagggaataaaccggcgacaaccggttcggaaaagctaactaagctactaataggcaattatacacgcaatacgtaacggttggttctaaccggataactgcccaccaccacacgcagtccctactaggccttgatctggaactcttgatggcattgaagccagactcttgcatccaggagcgaatcaactgggcagcgtcacaagccagaggatgttcagtgacaaggcttggagactaaaaaaaactgcatgtcagaagatgacccgatgacaagaaataaaatgatgcaatcagtacataccaaccaagctcaactaatgtggcagtataatagcagctttgttggttccgagtgattgttgctggttccagttggttgtagtcatcgggagggcgaggtcctcggcaccaccacatctgcattctcatgatggactcgcgatgagaagagttgcacagatgcttgtgagtcgaggatgggtaaagaggaaagagggaagagggagcaggtccccttttatagacctttggcatgcacctcaccgcagtttaaaaaaaaacattacatgcatgccgcaccgctttgagcgatagacgggggtgctgattatgcgatatgattaaccggattatccggataataatgggtcttggtgctattttcaatcacctccacactatgctggaggactagacaaagtcaaacgctatccccacaacgcatttcaatcccgatattaagggtaactaataagaaccaatgaaatcagtaatggtttatgaacaatatgactatccaaaaaataagtgcagctagcgttcagaatggtaccgccaatagtacgtgcttcagggtcccttcctagtaagaacgccaggttgattcaaccctaggctggcatttcgacgacaggctgaaaacggtcctctcttggtctcctcttgttcaccctcagccttccattggggttgcatggtaacaattgtctgacacgacacttcaaattacttgccgatgagttgcttttttgatgaccacatgcaccttaacaagatacgaggtggggattacagagagtcacagacaatacgatcacagtaccgtacacgtcgtcactgccaaagtaggaaagtctacaccaacatggtcgttatcaaccgtgcaaaggatttatccttgcccacagcacctta

SEQ ID NO: 4417 - DNA, 1543 bp, Spizellomyces punctatus
  source 1..1543: mol_type = other DNA
taattttcaacatgccaatctgatccctcaaatcctcaacctcttgtcgcacattagcagtttccttgacccactccatacgaccagtatgtcctcgtgcgcggcgctctcgaccaagttcatcacgaagggattcgatttccattgtgagttccgtgttgagtttaatgaggtttgaacagtctgtttggagttttaggcggagggtttctgtttgttggtgttgggtttgggaggttaggagttgggttttgagggattggagggtttctggggggatttgagggggtgggggtggtgttgtctctagttgggcctatgggtttaaaacgttgggtgagttggtttgtaaaatacggagaagagtttgattcacccccaaaaaacgagaaagcactcgacatttacaaaatgcttttttgtaaagtggtaaacgttacctgaagaaatgctttatcacgactcaattcctctacttttttttgcaacttgtcatgaacttgtacttgttcctccacctacctcacaaacaaaaaacgatcaacattcacaaaaacaacagttaaaaacaaaacctttacaaattcccttgacgagtccttacctgcccacgcaaacgctccacctccattttaaacccaacaacctccttaacaccctcctccttctcctccctacacctctcataagaaatctccaatcgcctcatttccgcctttagattctcatgatcttgctttaatgtatgaatcgtcttgtataagccgtctttttcggtattgtgatttgtttggagggtttgaaggtcctgcaagagttggtctcgggtttgggtgagggattcggtcgttagggttgttgtgtggttttgtttttggaggtttgtgatggtttcttggagtttctttttctttggtgttaaaccttttgtttttacaacaataaacaaaaagacttttttacctctacttgtcgcttatacccctcctgtaactcgacatacttgttttttaaatctttaatgacggtgttgaggggtgcggtgggtacacctccattaagacatgccgacgtcgcatcggtaccctgaaatgggaacgaagtgtcctctaaaaacgacattgatgaatgactttttttttttgcaataaagatgatgtacaatttggtaccattcccagatttagatcgtccagatcgtctttggaagaaaaaaaccccatttaaaaaaaaaaaaaaaaaaaaaaaagatgtcagtacatgacaaaaactcaacccaaacccaactacaaaaaaaaaaaaaaactcacaaatatctcgtctccaattccaacaaataaacctgctgctgcaaattctttatatactcattctcaaccgccgatctctccttctccctctctggtttttcacgaggaagagtggaaggtgatgatcggggtcgacgagtaggtgattgagatttcctaactaaaaaataccaacaaacgtttagcgagtacctggcggtgcaagttggttgcttggttatacctccgctggt

SEQ ID NO: 4418 - protein, 352 aa, Spizellomyces punctatus
MTCLPDTPLTFASKGIPHRYIQDPTQQTTTLCWKCGGTGQKPSKPNQKTTPLDCSPCQGTGTISPVPRTTCKPTIRPFRPPPGWTPRGPRTFGDPHDPLWAPRPGDMLTSLSGHWMIYQLVHGHRYTTDDVLTAAIAVTHMKGTHVDTYVDLGTGLGSVLGMVAWSLGVPKAIGIEAQGIHVELARKTILFNGCKNVEIVHGDLRSTEIHIDPAMLVTGTPPYFPSNRGALPTHPNRGMCAFELRGGVETYCFAAARYLKRSDKARFVFCQTGLEIPRSELAIKHVGMQIHERWDIWGRATQTQALICIFCCGWGEWVDNYRVLRLDVRDREGNVSKDMRVLMDVVGKAVLV

SEQ ID NO: 4419 - DNA, 643 bp, Spizellomyces punctatus
  source 1..643: mol_type = other DNA
ccccgcaactcaaatgcacacatcccgcgattgggatgcgtaggcagtgcacctcgattcgaaggaaaatatggtggtgtacccgtaaccaacatggcaggatctatatggatctcggtactacgtaaatccccatgcacaatctcaacattcttgcacccgttaaataatattgttttccgcgcaagttccacatgaatgccttgtgcttctatcccaatcgctttgggtacacccaaactccacgccaccatgcccaaaacggatcccaaccccgtcccaagatccacatacgtatccacatgcgtgcctttcatatgcgttacggcgatagcggctgtaaggacatcatcagtcgtgtaccggtgtccatggacaagttggtaaatcatccaatgaccagagagggatgtgagcatgtcaccgggacggggagcccagagtgggtcatgtgggtctccaaacgttcgtggtccacgcggagtccaaccaggtggcggtctaaatggccgtatagtaggtttacatgtcgtgcggggtacgggggatatggttcctgttccttgacaaggcgagcaatcaagaggtgtggttttttggttgggtttgctgggtttttgacccgttccaccgcatttccagc

SEQ ID NO: 4420 - DNA, 1610 bp, Spizellomyces punctatus
  source 1..1610: mol_type = other DNA
aggaaaccctttcccaagtggataccggatttgaaaagccgggtatgtgtacgtaggtgtcgtcactgcaagttttttagtttttcattatcctgttttgttgcgatataaggatctactcactttcttagtttcttgtagataaaaccgttttttccgcaaaagatggaacgagaatgtggatattgttagttttcgttcataacaaaggtcctctccatcatcgggatacaagcgcagagtagcggatcgtacctggtcgtctttggaataccatgtagaaaggaatataaagtgatttctgacaagtaaaagtccgcaacttgccaagtgcaaaaggatgccttaaacgaaatgtggccgagcggggactatgctgacgtaatcggatctatgtggaaactctaatgcctcgtagaatatatacatagtgtggaggtgattgaaaatggctctaggacccatttttatccggattaatccggttaatcatatcgcataatcagcaccccctctatcgctcaaaaccgtgtggcatggattgtaatgtttttttcttttaaactgcggtgaggcgcatgccgaaggtctataaaagggggacctgctccctcttccctctttcctctttacccatcctcgactcgcaaagcatctgcgcaaccctcatcgcgactgtcaagtccaaccatgagaatgcagatgtgtggtggtgccgaggacctcgccctcccgatgactacaaccaactagaaccagcagcaaccactcggaaccaacaaagctgttattatactgccacattagttgagcttggttggtatgtactgattgcatcatttcattctgtcattctgtcgctgacatgcagtttttagtctccaagccttgtcactgaaaatccaccagcttgtgacgctgcccagtcgatttgctcctggatgcaagagtctggcttcaatgccatcaagagttctggatcaaggcctagtagggaccgcgtgtggtggtgggcagttatccggttagaaccaaccgttacgtattgcgtgtataattgcctagtagtagcttagcttttccgagccagttgtcgctggtttattccctggtgtagtagctagtgccagtttctgtcacctctacactaaaaatatataacaaaaaacacaactatacaaggacctgcccgttcccatataccactcacacacccacattccaaaacacgcttgacaaaccaatcttactactcgcccacccaacaaaaaactctatgctcataagattatacaaggaccgccttaccaaccacatccatcaacacccgcatatctttcgatacattcccttctctatcccgtacatccaatcgaagaactcggtagttatctacccattccccccatccacaacaaaagatgcagatgagggcttgagtttgtgttgcgcggccccaaatgtcccatcgttcgtggatttgcattccaacgtgcttgattgccaattctgatctcggtatttctaaccccgtctgacaaaacacgaatcgagccttgtcggaacgtttgaggtaccgtgccgccgcaaaacaatacgtctcaacaccc

SEQ ID NO: 4421 - DNA, 612 bp, Spizellomyces punctatus
  source 1..612: mol_type = other DNA
cgacgcacctcgcctgcccaacggcggatgccccgaattccccgccacacgttcctatatgaaatctaacccatgccccgtctggcgctggatcctcaaatcctacggtccccatcacccgttcacaaaagcctgttttgacgatgctctcagtcgcgctgcagccgatcgagacctccacgctctccacgacgagtttcttcaatctggggtacgcttctacccccgccacgttaaaatactcgcatgccgcctcttgcaccgagacatgactgcgaacgccctccatctgctccaagtcctccgcgagcaaattactgacgaccgcgacgcggggatcctcactgacgctgaacgatccgaatggctacacacactccgcgacgaagtcgttgaaaacgatgaatgggcccaccggatgcgtacgactcagttggaaggcggcgctcgaggcggtgcctaccgtatctcccggcccccagaagatgcacttcgctttcttgacgaggcacgcgagatggtgctagatttgatcccacctgttcctcctatcccgcgggtcgactggaataccgtttctgtccatcctgcgcggagacaatcggtcaaaac

SEQ ID NO: 4422 - protein, 273 aa, Spizellomyces punctatus
MPTTKPTKPMVQKYKTYGTYTSYSLPLPTTTPRVPSLLTNHFWVLVTFVTACMVYWSATRVVDTVLPFSVWGFLGEVKEEGLGKKVNVELFVMAKCPDAVFCEGVFANVLLEVSSITHFTTHYLASRNTTSSTGLTCKHGPSECQGTLQQLCIRHLHPDPKIWFNYILCTNRDYRAIPDRERAEVCARAVGVEYEELEGCVESKGRELAWKDVKVAKERGVSRSCTVHVNGKHRCTHDGGEWYDCPGGHAVEDFVKSVCEAYEGEKPRACREV

SEQ ID NO: 4423 - DNA, 1020 bp, Spizellomyces punctatus
  source 1..1020: mol_type = other DNA
ccgctccttcgccaccttcacatccttccacgccaattcccttcccttgctctccacacacccctccaattcctcatactctacgccaacagctctcgcacacacctctgcacgctctcgatccggtatggcgcgataatcccgattggtacacaatatgtaattaaaccatatttttggatcagggtgcaggtgtcgtatgcagagttgttggagcgtgccttgacattctgatggtccgtgtttacatgttaaacctgttgacgacgtcgtattgcgactggcaaggtagtgggtcgtaaaatgggttatggatgatacttcaagtactaaaaaaaactctattgtcagtagagaatccccgataaagcaataaaccgcacaagacagaacttacaaacattagcaaagaccccttcacaaaacactgcatctaacaaaatactatcatgaatcctcactaacatagtgttcattgtatgtagagtaaaacctaccagggcactttgccataacaaacagttccacattcacctttttgcccagcccttcctccttcacctcacccaaaaacccccaaaccgaaaacgggagaacagtatccacaacccttgttgcagaccaatacaccatacatgccgttacgaatgtaacgaggacccaaaaatggttggtgaggagcgagggaacacggggggttgtcgttgggagtgggagcgagtaggaagtgtatgttccgtaggttttgtatttttggaccatgggcttggtgggcttggtggtgggcatatttttaccacttagtgccagtccagaaaaggtttcttgttaatgtcgatgcaaaaaagacagtgtttggcgtttatcgagaactcgatggcgatatgattacgtaattgcatttgtaaatgcattttggaaatgcagactcgcttgcatttcaaccatttgttaacatacagaattttagagctcgcatattctttttatctctttttcattccttgaattatcctctca

SEQ ID NO: 4424 - DNA, 1427 bp, Spizellomyces punctatus
  source 1..1427: mol_type = other DNA
atgggtgaagcgcatggggctgtggtggaaggagcagtgtgaacggggcgtgtggggtgttgttgatcatgtagtttaacgggacacgtcatttttctcttctatgcattgaccggccggcctcgtttcgaacgtgtcctgaagtgtgatgaacagtcagagacgtttttgttctatgaaaccatgtgtttgtatcggacgctattgtatgagactggttttgtctactgtacatactcgtttgtatgatttactttttgtttctttacctcatgggttgtgtatagcggaccgtttttatggacagttgtaaatgcaaggaaaaaaaggggggatagtgtaaaaggaatgtacagttgtgaaagagtatagtggtttaataaagttttttttccgtatccttaaggtgaatgtatgaggtttgtttattgagctgaatccgcggatagtgtagaggtgacagaaaatggcactagctactacaccagggaataaaccagcgacaaccggttcggaaaagctaactaagctactactaggcaattatacacgcaatacataacggttggttctaaccggataattgcccaccaccacacgcggccctactgggcctttgatccagaactcttgatggcattgaagccagagtcttcgcaacattggggagactcgcaagctggaggatgttcagtgacaaggcttggagactaaaaaaactgcatgtcagcgaggtgaatgacagaatgacatgatgccattggtacataccaaccaagctcaacaaatgtggcagcataatagtaggtttgttatcggatccgcttggttgccactggttctgatcacggttgctgtcgggcagtcgaggtccttggcaccagagcagtattctcatggtgaacttgagacttgttgggcagatgctttgagtcgagggataaagaaacaagaggaaagagacagaaggccccccttttataaacctttggcatgcgcctcaccgcagttttaaaaaaaaacattacatgcatgccacaccaatctgagcgatagatgggggttctgattatgcgatatgattaaccggattaatccggataataatgagtcctagtgccattttcaatcgcctactcaatatgcatttctgaactatccttctacctaacaagtgcataaagaatatttaccgcactgattcacacctccctacacgcccggggcttttccccttcatacgcctcacatacactctttacgaaatcctcaaccgcatgcccaccaggacaatcataccattcacctccatcatgcgtacaccggtgttttccattcacatgaaccgtacacgatctcctaaacaaatgtacaatttaatatatacttttgttaacgcacatagacgaggggacttacgagacacc

SEQ ID NO: 4425 - DNA, 1316 bp, Spizellomyces punctatus
  source 1..1316: mol_type = other DNA
aagtagaacatgaactgaacaccttatgtgcgcgggatgaagaatttcaatccagattggatgaaatcatgctatcggatgcagctctgcagtacgacgaattgggtgagatgtttcccgaaatgaaagagccagatgccttgtttgaacgatgggataattgtttggcgcgtcgtgaagcattggccagtgagggtgaggctatcaaggtttttctaatggagcggaatcggaagatgcgggcgcgtatcgggatatagaccttttggatatctgtatcatgtaactataattgaatttgtaaatagcatataagaatacattaatgtacaagtaagaccgggtaaagtttgctacgtgactggctagcgaaccggagcgattcgataaacataaagcagaagatgcagcgcactagagcgtggtaacacaagaaacaaaacattttctctcataataagccctcctgcctgaacagccgaaaaaattggtacgcctcatgcgcccgtgtgaactcgtcctctcgtaatcgaaccgctgcatattcatgccaatcattcccatctaaatctgcctcgggtatttggatacgcggacgtttcgggtctcttgaagaccagatggaacagcggttaataatgcattgccaaggtcagcctttgcaaagtcttaccttatcgctacatccgctggccgtttggtcggcatagtcatactatgacaatttgatgtgagttggatgaattgctaaatccgcctgtacgataaccacctttcagtttttttcagagctcccagcttgttagcgctttcttcggcattcagcgcgcttgcctgctttctcatgcttcgtccatgtaacgccaaagtcagctcgatgtcgctgattccaggtattccttgcagagcaccccgcagaacaccccgaagtcccggcagggctgccgaagaggatccttccaacttcacattctctgccttgcttaaagaatgagcagctcttcatgggtggatgacgcgacagccaggacgtacctgcacgaataggcctctcactagctcaccgcctattcgcatggagcctattcgtatgatatagtcaccgtgctcgtatgcaataccctaagcgtgaggccaccgacaaaacgtagacgttcagtactcttgagtggatgttcacgtttcgggcgaagcagtacctccacgacaacctcctgtcgctttgtccagagattcttcaactttgttaatataagttcaaaatccctatccacttccaccactattcctgtttctccctttcccgcattctcccc

SEQ ID NO: 4426 - protein, 298 aa, Spizellomyces punctatus
MGITCLLYLPSAPSTAVDHINERLTDDLDFTELDEPWLVTCRSYRDQVAMRQRAAANSGPKAGSNSSYVPKIQYLLTFGHVEKMFSMVATMGGRRTGENAGKGETGIVVEVDRDFELILTKLKNLWTKRQEVVVEGIAYEHGDYIIRIGSMRIGGELVRGLFVQAENVKLEGSSSAALPGLRGVLRGALQGIPGISDIELTLALHGRSMRKQASALNAEESANKLGALKKTESMTMPTKRPADVAIRDPKRPRIQIPEADLDGNDWHEYAAVRLREDEFTRAHEAYQFFRLFRQEGLL

SEQ ID NO: 4427 - protein, 249 aa, Spizellomyces punctatus
MRQRAAANSGPKAGSNSSYVPKIQYLLTFGHVEKMFSMVATMGGRRTGENAGKGETGIVVEVDRDFELILTKLKNLWTKRQEVVVEGIAYEHGDYIIRIGSMRIGGELVRGLFVQAENVKLEGSSSAALPGLRGVLRGALQGIPGISDIELTLALHGRSMRKQASALNAEESANKLGALKKTESMTMPTKRPADVAIRDPKRPRIQIPEADLDGNDWHEYAAVRLREDEFTRAHEAYQFFRLFRQEGLL

SEQ ID NO: 4428 - protein, 239 aa, Spizellomyces punctatus
MSRLHSSSGPDGDAGPAKLYIGHVSSRANTRDLEDMFAKYGRVLNVEVKPAGYGFVEYDDPRDAQDAMHALNGYIFEGQRLVVEFSRRAGNATSNCFICGQVGHWVRECPENVDKGLDVRSGKCFKCGEVGHLAKFCRGGSGRGRSRSPPAHYRSRSPGPSRRRSPSPRGGYRDRDRHSSRRLPDPSPPSRYRDDRSPPPPRRYDQSPPRRDYGRDRNGRDRDGYNSRHRAASPRSHRY

SEQ ID NO: 4429 - DNA, 637 bp, Spizellomyces punctatus
  source 1..637: mol_type = other DNA
gggtccggtgcgtaacgatgagtttcatatttttcctagatcttccagtgagattcggtcatttacaagactatttgaatagggaatgtccagagaatgtagataagggattggacgttcgatcaggcaaatgcttcaagtgcggcgaagtagggcatcttgcaaagttttgccggtatggagtgacttgaagtgtttaccaggagctaattattaacggcatgtttgttgcattagaggagggtcagggagaggtcggtcgcgctcaccgcctgcacactatcgttcccgctctcctgggccgtcgcggagacggtctccatccccgcgcggaggctaccgggaccgggacaggcattcatctcgtcgactaccagacccttctccaccttcccgttacagggacgacaggtctccgcctccgccacgtagatacgaccaatcgcctccgagaagggattacggtcgtgatcggaatggacgtgatcgcgatggttacaattctcggcatcgtgctgcctctcccaggtaggactttatgactgtgggcgtggcgggttcgaatggacaactttcggtacgaaggactgctgcaggaatattctccagtcggggctttgattgtatgaccaggaaa

SEQ ID NO: 4430 - DNA, 1612 bp, Spizellomyces punctatus
  source 1..1612: mol_type = other DNA
cgttcgtcgtccacccattgtcgcaaccatggaaaacattttttctacatgcccaaatgtaaggaggtactgtattttcgggacatatgaggaattggagcccgccttaggcccagagtttgcagctgcccgttggcgcattgcaacctggtctctgtatgagcgacaggttaccagccatggttcgtcaagttcggtaaagtcaaggtcgtccgtcaagcgctcattgatatggtccacagcggtcgaaggggcgctcggcaagtagagaaggcttaacttgcaagaataaagtttagagcaacaaatacgcaagcctaggagtacgttgaccttttgaaactcaccaggtaatgcccatgttcaggtgagagatcctgcaaatctacaagctactgtacatagtgtggaggtgattgaaaatggcactaggactcattattatccggattaatccggttaatcatatcgcataatcagcacccccatctatcgctcaaagcggtgtggcatgcatgtaatgtttttttttttaaactgcggtgagccgcatgccaaaggtctataaaagggggaccttctgtctcttttccccttcttgttctttaccctcgacttgcaaagcatctgcccaactctcaagtctcaagtccatcatgagaatattgctctggtgccgaggacctcgaccgcccgacagcaatcgtgatcagaaccagcggcaaccaattggatccgataacaaaaccaacttttatgctgctacacttgttgagcttggttggtatgtatcgatggcatcatctcttttcatgttattctgtcgctgacatgcagttttagtctccaagccttgtcactgaaaatcccccagcttgtgacgctgcccagtcgattcgctcctggatgcaagagtctggcttcaatgccatcaagagttctggatcaaggaccgcctgtgatggtgggcaattatccggttagaaccaaccgttacgtattgcgtgtataattgcctagtagtagttagttagcttttccgaaccggttgtcgccggtttattccgtggtatagtagctagtgccagttctgtcacctaatacactacaaatcgctgcctggttgggtcattacgatatcgactgtgccatccgttgttacgcaacgcccaaattggatatcaaccccacaaagaacgtcaaaaacaaggtttacaaacgttgaaaaccaaaaagatcatgtcccgattacacagcagttctggcccagatggcgacgctggtcctgccaagctctacattggtcacgtctcttcgagggctaatacacgggatctggaagacatgttcgcaaagtacggaagagttctcaatgttgaagtgaaacctgctggatatggatttgtggaatatggtaagcctgacatggtcacatacaatcatatacctgattctcattataatcttgcgaaagacgaccctcgcgatgcgcaagacgcaatgcacgctcttaacggatatatttttgagggacaacgattggtagtggaattttctcgtcgggcaggaaatgccacttccaattgttttatttgtgggcaggttggacatt

SEQ ID NO: 4431 - DNA, 967 bp, Spizellomyces punctatus
  source 1..967: mol_type = other DNA
ctgtgggcgatggaggacgggcggttattgggagttttcaaaggccacaagagaggtatatggtctgtggcgttttcaccggttgatcaagttttggcgacgagttcgacggataagactatcaagttgtggagtgtcgtggacttcagttgtgtcaaggtcagtatgtgtgtatatgtgtggtgttcttgcaaaggtgcttatttcttttttggtagacgtttgaaggacatttgaactctgttctttcggtttcgttcctgtcggccgggatgcaattggtgtctagcggatctgatgggttggtaaagctctggacgatacgaagcaacgaatgcgtgacaactctagatggacacgaagatcgagtgagttgagtgggaataaagtgtggaatgtctgggacgtttaataaccggatgtttgcagatctgggcattggcggtacagaaggacgaaaaatacgttgtgtcgggttcatcagattctaccatcgtcgtatgggaggacatgacgatacaagaagaagaaaagaagcaaagagagaacgaggagcgggtactcctgtaagtccctctctagaccaatctctctcatgtacacgtctctaacaccctcttgttcaacagagaacaagacctctccaattacctccacaagcgcgactacaaaaatgccattctccttgccatgcgcctagaccaacctttccgcctcctcacccttttcgaagacctttccacgaaccgccaagacccatccagcattctcggctcgaccgccgtcgacagcatcatctccaacctaagcgattccaaacttgctcaattactaaactatatacggacctggaacacaaatacccggcacgcacgcaccgctcagtccctcctccatgtcattttgaaagcatatactccggaccggttgatgcgtgtacctaaatgtaaagaaattgtggatgcac

SEQ ID NO: 4432 - protein, 236 aa, Spizellomyces punctatus
MSAPATITCYHACAASTTLRRIPSADTFVPFHTCSSIMFSAWKTINPRIVRGEGSLSITPVTTGRGDVLMMAIIFFFGVAMTLYTTEDLPYRIAGSAMYAYLAWTLVVDTYETVFDKQLEQVSIIKTTLGFKRWSRVAPLDELVAIETTTMETTSKKQKPLYRLELEFYTTHGTYRMPMTETYVSGEHNKEKLEEVEDIVRKFAEIKKLPNWMKEEELEKRFGAGKKQAKTRKKGN

SEQ ID NO: 4433 - DNA, 325 bp, Spizellomyces punctatus
  source 1..325: mol_type = other DNA
gatttcagcaaacttgcggacaatatcttctacctcctccaatttctccttgttgtgctcaccactaacatatgtctctgtcatgggcatgcgatatgtgccgtgggtggtgtagaactccagttcgagacggtagagaggcttttgcttcttggaggttgtttccatagtggttgtttcgatggcgacgagctcgtccagctgcacagacacaaatgttgagattgatatatagtgtacagagcaatgtacaggatgtcagcgtaccggagcaacccttgaccatctcttaaatcccaaggttgttttgatgatgctaacctgc

SEQ ID NO: 4434 - DNA, 1610 bp, Spizellomyces punctatus
  source 1..1610: mol_type = other DNA
ttttggcatacacagagcgacatttgaaaattgcggatgggctactggtgcagagttatgttgttgattatactgttgagtgtatggttgggtttgaggagcaggatgatctagaagaaggcctggaggaaggtaaagtagtgggagaaatggaggactggatgaatgggttggttagtaatggtgtgaatcggtcgcatgaatatggaatgtcgagtgggagtgagcccgaggacgaagatgaaccaagtagtagtgaacaagaggatcacaatgatgatgacgatgacgacgcaagtccatcgtctgagcaagacagtggtgacggatcagaagaagaggacgaagaagaagaagaagatgatgatgatgatgatggagaagagagtgaaagcgacggtgggatggatgtagatgcatgaatctgtaatttgtacaatgggtcatatcgttaatttattttatcgcaacatcaattcccttgttcgcttgttggctactttccggcaaacattgccggtaaaaacctcatatcatagtgtggaggtgattgaaaatggcactaagacccattattatccggataatccggttaatcatatcgcataatcagaaccccctctatcgctcagattggtgtggcatgcagcggtgtggcatgcatgtattgtttttttttttaaactgcggtgaggcgcatgccaaaggtctataaaagggggacctgctccctctttcctctttacccatcctcgactcaaagcatccgcccaacaaatctcagtccaccatgagaatactgctctggtgccgaggacctcgaccgcctgacagcaaccgtaatcagaaccagcagcaaccaattggatctgataacaaagctgctattatgctgccacacttgttgagcttggttggtatgtaccaatggcatcatctcttttcatattattctgtcagtgacatgcagtttttttctctagtctccaagcctttgttgctgaacatcccccagcttgtgacgctgcccagtcgattcgctcctggatgcaagagtctggcttcaatgccatcaagagttctggatcaaggcctagtagggaccgcgtgtggtggtgggcaattatccggttagaaccaaccgttacgtattgcgtgtataattgcctagtagtagttagttagcttttccgaaccagttgtcgctggtttattccctggtgtagtagctagtgccattttctgtcacctctacactatagatcgatagtaatgaccgtaacggacaacgagtaagagccgaactatgggtcatatgtacaatccatctcattgaatgtattttacatttcgttttctcacgcacgtgtaagcctccagtccttgcccagtctcccctcgatcaccattaacttccgtcaacaatcagccgagataaaatgataatggttcttaagagaagtgagcgatttgcatggataggcgtattttttatgaaagatcttgaggttcactcctcaattccccttcttccgcgtcttagcctgcttcttcccagccccaaatctcttttctagttcctcctccttcatccaattcggcaatttttt

SEQ ID NO: 4435 - DNA, 1008 bp, Spizellomyces punctatus
  source 1..1008: mol_type = other DNA
catcaccttggtgtgtctcgtagctaacgaagagcatcaaaataacaattacatccgctgcattagtggcaatcactcagctgatcattttggtgtgggcgatcgttgctcgctctcccggcgggatgaatggcgttgtgtacgtatatgcgattcgatcaatggctgtcgcagggtctattgtgccaggtgaaaggtggcttcatactgtctgtcgctgcatgctatctgataatctgtccaggcatttatttatatggatacgaaaaagtcatcgaggcccgtaaaactcgggaacttgaccagcagagttcggggcaaattgcagcattacctgacctacgtaccctaccaggaagatctgaggcaaaatagcaagcagtaatcactcgagatccgagataattactgacgaagatgtatcataatctctagaattactatttcaactggtctatttcagttcactcaaatagttatttcctgtatattccgctcagggtgctccaagatgtatctagtactcgacggaacatgtccatcaatgcgccccgtgaaaaactgggcaggaaacgagatagatggataatgacaggggtcatactttggaaggtccactgtggaagggtgtttactggatttcgtactgcgcgcaccaggtagtggtgagcagaggtggtgcagtttctaaaattgatacattatttttgtaagcagctttgtgaggtgcaccaaaaatattaattacaaccttgcaaatgtgcacgggaagctaagtgggcgagtgtttacggccttataagtgcggacttttgtccgggtgagagctaaaaacatttcgtgtgcagcgtcggttgccagggacaaaggtgcattaggactcaactctcttgtctcatgaatcgtgccagtttgacacacctttcatctcatttcatcggtctatagcatagatgatatcaatttattacggcggaaagatagcctggccaatcctacttgcagaac

SEQ ID NO: 4436 - DNA, 793 bp, Spizellomyces punctatus
  source 1..793: mol_type = other DNA
tgctggatcacctccatttgaacattatcccttgtccgcaatctcttgttcactaaagagggaagcgcttgttgcacactgataaatcttccaatcccaagacaatgccttgataatgctacgcagaaggtggatgcacaggtaattagatgaacatgttggaaacagttttaaggaaatctcattgcatgaatatattgtgcatttctattgtgaaatttgaaagactgttgaaaattgcggagctcgttgaggttcgacgtatggagctttacatgtaaacctggtaatactgtctgtcttatgcgcgtgaggacctgtcacggaccaactaattcaacccaaaaaaacactgtgacgaatacaatacgccaatttgtattcaatacgccaactagacctagctacaaagcaacttacaccaaccatgcgaaaggcccctctgcatcactcgctgagaacagcgagccgtgaggcttgggactcacagagctgcattagcccttcgctcgcgcccaccatctcagggccagacatgtcacacatgtctgggatcaagttcgatcccattttgagatggcagagtgtgcttcggtccgagttagcgccactataaaaatattagagaaatatcgacgataggagacagttgaatggcgtctatagtcaccttgaaaacgaaacgaggaacaaaagggcttgtatcgtagatgtgttggggttgtggcgaccttgaccatatttcagatggtagatggtggaaatgctaccataaaaatattagagaaatatt

SEQ ID NO: 4437 - DNA, 1598 bp, Spizellomyces punctatus
  source 1..1598: mol_type = other DNA
gctgtccaagaggcaaggcgcccgaaatcttcggcactttcgcgcaattgatctgcttcctgagctgaaaaggtcacgttctccacccaggaaagagagagctttcgcaggctcaagtgagccgtatgacagaaatgttttccctgcctaattgaaatttggtgcaagaagtcgcaaaaaaaatgcagatgggacatcacttttggcttttgacatcacaagttgacagttagcttggtgggttcagctgttggcgaatatgaatgggtgcctggcaaaacaacgtagccgtagcggattctatgaatcatattcaatcgtccctctccaacttgctaccggtaaagatcctttgccactgctttcggctgccatgtcctgagttgcaccagtagttttggcttggctgctgccctctgatcgcgttatacaagtacatagtgtggaggtgattgaaaatggcactaggacccattattatccggataatccggttagtcatatcgcataatcagaaccccctctatcgctcagattggtgtggcatgcatgtaatgttttttttttttaaactgcggtgaggcgcatgccgaaggtctataaaaggggacctgctccctcttccctctttcctctttacccatcctcgactcgaaagcatctgcgcaaccctcatcgcgactctcaagtccaaccatgagaatgcagatgtggtggtgccgaggacctcgcccacctgattacaaccaactggaaccagcgcagcctcggaaccaacaaagctgttattatgctgccacatatgttgagcttggttggtatgtactgatggcatctcttgtcattctgtcattcatctcgctgacatgcatttttttgtagtctccaagccttgtcactgaacatcctctggcttgtgacgctgcccagtcgattcgctcctggatgcaagagtctggcttcaatgccatcaagagttccagatcaaggcctagtagggaccgtgtgtggtggtgggcaattatccggttagaaccaaccgttacgtattgcgtgtataattgcctagtagtagcttagcttttccgagccggttgtcgccggtttattccctggtgtagtagctagtgccagtttctgtcacctctacactatagtattaattgatgttagggatacgattttattgacagcaatggacggaacgccatgccaggtgtcccagctgcaaatttttgtatctcgctgccaagaattctagcagagaggtggcaaaacacgtagtgtggctccttcttaaaggtaaaatggttcgtaattacttgtttctttgttttatttagtgatgacagagtgagcaaaagcttacgaggtgtgtagctttgtgtagaaatttcgcatgacaatagagcaagagttcgtatgtcaaaattcattccatactttgcggtgtttgttctacgattggatggccgtcttctggacgtgcattgtaatggcctcccatttttgtcaatataatgggaatttccagatactgtgtttggagcagccttttgtcaatataatgggagttttgtctatgttcgcaaatatgt

SEQ ID NO: 4438 - protein, 236 aa, Spizellomyces punctatus
MNRAWKALIPPPYVNVVLRRSLVSQSSLTPVYHGPLKKTLVLLKRVSATTFGLSAVASPLLAFAEYANLAVVGTMMGAALVTSGLSTVLVQYCVNPYVSRLLIPDSSTSFSSRTIILETLTFFGNTRQTAVDLSDIMPASDRPFATWKVRNDAQTSDDGDARLLELIGGRRKFGLKRRRFYVHPELDEGFSEQMTQVMRTVNAAGRAGPQQPQPQSKAGGKAWDDIVKDLRKENRA

SEQ ID NO: 4439 - DNA, 873 bp, Spizellomyces punctatus
  source 1..873: mol_type = other DNA
tcctacacatccatcggctttgcaacaaagatagactgtggtcctgcaattggtcaaataaatacaaagcaattatcgatcactagcgatctagacgacagcgtagagtagcagttctaaaacgtattctactatgctctattctccttccgtaaatctttaactatatcatcccaagctttcccgcctgccttggactggggttgcggctgttgtggtccagctcgtccagctgcgtttacggtccgcattacctgggtcatctgctcagaaaatccctcatcgagctcgggatgcacataaaatcttcgtcgtttcaatccgaacttacgtcgcccaccaatcaactccaataaccgggcatctccgtcgtcacttgtttgcgcgtcattccgtactttccatgtggcaaaagggcggtcggaggcaggcataatgtcagacaggtcaactgcggtctgacgggtatttccaaagaaggtcagagtttctagaatgatagtacggctggaaaaggatgtagaagagtctggaatgagaagccgactgacgtagggatttacacagtattgaacaagcacggtagatagtccacttgtgactagagctaagtacagtcgaccgcacataaaagaagggaacccaaggttagcattctgcgccatgctttcggtactattgcgacgaacctgctcccatcatagtgccaacaactgccaagtttgcatattcagcaaaagccaataggggtgaagctaccgcactgagtccaaaggttgttgcggacactctcctgtggacacgccaagcccgctggttaccagagcgctaaaggttcaaaataccagaccagaattccttacttgagcaata

SEQ ID NO: 4440 - protein, 947 aa, Spizellomyces punctatus
MATEAMDPADPNSGVSRSLTITGQKSDGMVEKLKAKASMPLLTRSQSELGDVRHREGSESNGLYLEASSLERRFSGKVLDFLFKKNAKAKTIDAGYGRRVDVTVGDADVTKNRGPSADDEDRQSLRSVKSNSSLKSLAEGKKGLFNFRTKKSKQKKSLDITPSISAISLVTPSDGEKEAWLPSPPVASTTSNPSQSLIPESEPSISTERSQPVTISSPSSSLHLPTISPVSGSWSWVSAESQTHPGQTDIRELRISPRASSLKLLEKLASTSIPHPEKQETSAVLPNGWSAAKKGDESGKDISPVDGPSLRDGQEQGKEEKPEPADRADDDELKRKSTARSNRSTLSDGTPVVPDVLSPPKKPVVSRAGATIETDDPSHLFWVPAHLHPELHPNDFKKWLNNADAGPTDSTVFQIGKKPLRRSKSFVERHVVITPDNVEEFVEKDNIVRSRTVSGAQYQRGGKGLPPLRRSRNIRPKRPTMRSMQESANSTADSDSGPDYADGTSKESGPVRRRSRRKADRSSSSVRKKKAGNRRSKTIIMGPVEERSLTAPSEIPMDPSVSALEKQDTDKVSTSHTFSTPTPVELPKPPLELKVDAILAGDAYTHPASPEPSFHSPSESMTPDDLEILDVPQDEMASTTEDTAIGEKQKSKKKKEGKSWNWLSGFLGKKSPGSTKHKRAASLESNGSSAAEDDTWNAYPNDRFSDADGAPRFSPEVEKQIYRMSHIKLAQHRRPLSQQVLISNLMLYILSVHADVTLNRQGPRKRGRKGRRRGKSPGASSDRSRSPGRALPIPHPATGPVVQPNSILEAPTMPRSGQYFPGAPGISSLTGIPGAASGDYVTDGSPAQGYFGNGGDSHGSERRQRNLAHLAVIKAGGIDSGSASSLEPAWVDSEYLSSDHEGDPSPRSRSYSPDRATDSEEEEDEDDVPLGMLQQHRRGSISSVSSH

SEQ ID NO: 4441 - DNA, 431 bp, Spizellomyces punctatus
  source 1..431: mol_type = other DNA
tccgtttccaaagtagccttgcgctgggcttccgtccgtaacgtaatccccgctggctgctcccggtataccggttagactagaaataccaggagccccaggaaagtactgtccgctgcgaggcatcgttggagcttccaagatggaattcggctggacgacaggtcccgtagcggggtgtggtatgggaagggcacgccctggacttctgcttcgatcgctgctggcaccgggcgatttaccacgcctccttcccttccgtcccctctttcgcgggccttgtcgattcaatgtgacatcggcgtgaacagatagaatgtacagcatgaggttactgatgagaacttgttgagacaatggccggcggtgttgggccaacttgatgtgcgacattcggtagatttgcttctctacttcaggcgaaaatcgcg

SEQ ID NO: 4442 - DNA, 1598 bp, Spizellomyces punctatus
  source 1..1598: mol_type = other DNA
ccaacgtcttcttcaacggaccatgatacactggagtcagtgaggattgcgatacaagactacgacgtaatacgacgttgacatatggcggtggaatcagcgctttccaggctctgttcatgttcgcaaggaagaaggttggaacgtaggaaactggatctacctgaaagtccgcatgtcgatatgctgtgccatatttcggttgccaggatacgttccagtcaaaccctccgatcccaaataattgaagttttcatgtaaagccagtcaatgtccacaaagaatacccagaagtcatgtcggacatttgcatgataatcgcagtgatgtctcgtcctctgttgtttatgatgttcttttgatcgccgcatgtcactcgagcaaattaccatacatagtgtggaggtgattgaaaatggcactaggacccattattatccggataatccggttagtcatatcgcataatcagaaccccctctatcgctcagattggtgtggcatgcagcggtgtggcatgcatgtaatgtttttttttttaaactgcggtgaggcgcatgccgaaggtctataaaaggggacctgctccctcttccctctttcctctttacccatcctcgactcgaaagcatctgcgcaaccctcatcgcgactctcaagtccaaccatgagaatgcagatgtggtggtgccgaggacctcgcccacccgattacaaccaactggaaccagcgcagcctcggaaccaacaaagctgttattatgctgccacatatgttgagcttggttggtatgtactgatggcatctcttgtcattctgtcattcatctcgctgacatgcatttttttgtagtctccaagcctcgtcactgaacatcctctggcttgtgacgctgcccagtcgattcgctcctggatgcaagagtctggcttcaatgccatcaagagttccagatcaaggcctagtagggaccgtgtgtggtggtgggcaattatccggttagaaccaaccgttacgtgtttcgtgtataattgcctagtagtagcttagcttttccgaaccggttgtcgccggtttattccctggtgtagtagctagtgccagtttctgtcacctctacactaactgttcaagaccgccttgcaaaagtataattataccatgtttcattgaagtgtaatgaattgtgatatgattcaagtgaatgttctccttttttcactcatccttcaacctgatgaaaaacaaaaattatgtataaatccagcactacatccctctctaaatacgaaaaaaaacccttaatctacaatactcagtgactagaaacactactgatactgcctcgtctatgttgctgcaacattcctaacggtacatcgtcctcgtcctcttcttcctcagagtccgttgctcggtccggggaataagatcgcgaccttggagagggatcaccttcatgatcgctactgagatactcagaatctacccatgcaggttcaagagaacttgccgatccgctgtcaattcccccagcttttatgactgctaaatgtgctagattgcgctgtcgccgttcgctaccgtgcgagtctcc

SEQ ID NO: 4443 - DNA, 1675 bp, Spizellomyces punctatus
  source 1..1675: mol_type = other DNA
cattcctgcgctgaacataatgctttgtggtttgacccaacccttcaaaaacgcagcaaacagcacataattcacatgaactgcatcatcccgctctaatacatagtgtggaggtgattgaaaatggcactaggacgcattattatccggataatccggttagtcatatcgcataatcagaaccccctctatcgctcagattggtgtggcatgcatgtaatgttttttttttttaaactgcggtgaggcgcatgccgaaggtctataaaaggggggccttttccctctttcctctttcctctttacccatcctcgactcgaaagcatctgcgcaaccctcatcgcgactctcaagtccaaccatgagaatgcagatggtggtgccgaggacctcgcccacccgattacaaccaactggaaccagcgcagcctcggaaccaacaaagctgttattatgctgccacatatgttgagcttggttggtatgtactgatggcatctcttgtcattctgtcattcatctcgctgacatgcatttttttgtagtctctaagcctcgtcactgaacatcctctggcttgtgacgctgcccagtcgattcgctcctggatgcaagagtctggcttcaatgccatcaagagttccagatcaaggcctagtagggaccgcgtgtgggggtgggcaattatccggttagaaccaaccgttacgtgtttcgtgtataattgcctagtagtagcttagcttttccgaaccagttgtcgctggtttattccctggtgtagtagctagtgccagtttctgtcacctctacactatatacctcgtacagccattatgaaggacccgcgcctgttcatttaaaaatatcatcataacgaccacaattcgggttgtgtgtgtttgtagagtgtgttgattccctacccaatatgggaaagcgagaagattaacaaagaggtataaatcggggagttcccatcctgtgaacatagatagcatttgacaaacgggtttatagaactgaaaaccgaacccctgctacaaacaaaggaaaaaagcaaatatcggcaaactttgtccgcacttttgagcgtcacttgagccaaacagctacctattacattactgactcggacgatccaaaacaaatgcagaatagtctggtttttcgttacaaaggacgaaaaatacaaactgcaagtagcggagcgcccgctgtgggtgtcgaacccacgaccttaaggttaaaagcctcacgctctaccactgagctaagcgggcctggcattttgctcctggtacttgaattctccatctataatatcttacagagcatctgtggcgcatgcgcacgcgtactgctgggtttgcccccctcttgacatcatcagcaaggatttgccctggcacgctctgcccagcctctcctgtcatccaatcgttcagcccttccatcaccttaaactcacaggattcgctttccttttaccctttattttttttcagaaggcaaacgatcgtctgtcgaccggtttctactcatacgattctacatcaattctcacacccgtcattgttaaccacaagtgtctccccaagtaatatctgctatattgccccgaactgctctcaactcgacagtccttgaagattctacaatgtggttgctgtc

SEQ ID NO: 4444 - DNA, 1150 bp, Spizellomyces punctatus
  source 1..1150: mol_type = other DNA
actttgtagattgcgaggaagagcagaatctgttggcatgtgtcaaggacaatgccaatagttgggtcagcctcaacaagcgtcgagttcagcattatggttatcgatttgattacgttagtacttgtccagctgagcggagctctttttttttttgggcggggctcaattttctcttttcaaaccgtcctgtagccgctcaacacggtggattttgacacatccatcattgaccctataccaccatggggtcaagaaattttaagtaggtattgccgcacatttcctttgcattcgacgcccgatcagttgaccgtcaatgagtattggccgagcgccggaattgcgcctcacgccgatcgacattcgatctttggggacgtggtgattgctctaagtctgggaagcggagttgtcatggaatttcggcgaccagaagagacaccgtccaccactgtgagcaatccgtgtaaaccattctcatatcattgcataaatatccatcttccacctcggtcactgctggtcatgtcgggaaatgccagatatcaatgggagcattctattcgcccacggcggacagatatcgtgcatggacgggctattgagcggggaacacgggttagtctcacttttcgcaatgtcaagcgcgtgaaaggatgtgaatgtgggtggactcatgcgtgtgatgttgggagggatgacacgggacgactagatattgggtaaatgtaaaaatgttataatcataccagatacccgagaaaacaaacatatgcttgacatgcgcttagaaacaggatttgggtttgctgaccaaatggatgtactcaccagcgatcacaaaggcgaaaaaagccccgcccaggaatttaccgaaaacgagttacgtaggagaaaaccacaaggacagtgtaaggggcccacgtaattcatcggtaataatgaaagggggtgttaatgttgaccgcaccagccgtctgtctctccgtaaaacacccgagatcggtgtttacacttttttgtcttttgtcaaagtcccctgtcgatttgctcgagcacacacacacacaagagtatccgcttgccttagcttttgacaaaaaatgcctctagaacacaagtgagttgtctcgtatcagatggattt

SEQ ID NO: 4445 - DNA, 637 bp, Spizellomyces punctatus
  source 1..637: mol_type = other DNA
gtggagcatgccttgatgctccccaaatcatgtttgccctttgttgccgaccccccagatcatgtttgccctttgttgccaactggtcacagtacaagcgtgttaacaacttttttttttctccatacacaatgtctactagtatggggatcgcctacgctgtctaatggccagttgtgcataacattgattccacattatgtaagggctcaggtagccgtcatctcggttcatgtctcaggagtacatgattatagcacgtcaaccaattcaattgacacaaccaaaactgtatccgtgttccagccagttttgtatctttatcgttattattaaatccttcgaaatggataaaaggatctacatcctcaagggtacctgccaacatcaattccccgaattcccgtcaccctcctaaccaaatcctcatcaccaaagataaatccatctccttcaacctccggtttaccctgtctaactttgacaaatctcgccttcacctgcgcatcgtccatatccaaaagcgcatgcactcgccgaaattctggcaagagctcgatatccatggctgcaaacacgttggcaacgtatcccacatccgtcaagagttgttttgtaccgtgctggcttaatcggg

SEQ ID NO: 4446 - DNA, 1612 bp, Spizellomyces punctatus
  source 1..1612: mol_type = other DNA
agaattcagcattgtacacatcagtaaacccctcatgcaaaatagatggtggggcaatctttcacacattaacggttttcgtgaatacggtctgtcacccttttacaccaaccccatgaaaggtttcctcaacccgggattgtttaaattttggaaacgcatcagccggcaagcgttgttttttggacctccagccatggtggcgtggggagtcatgacatgggcggataacaaggtgagcttttttcctctgccatgtcgattttctttctctcgatctacaagtttttgatcagaaaaatgccctagtttgagcattacaatcggaagaaatacttggagagctttcaggcgacattttgaaaaaaagcgtaaacaaaagaaagggcggaagacaagtcttgtacatagtgtggaggtgattgaaaatggcactaggacccattattatccggctcaatccggttaatcatatcgcataatcagaaccccccatcgctcaaagcagtgtggcatgcatgtaacgtttttttttttaaaccgcggtgaggcgcatgccaaaggtctataaaaggggacctgctccctcttccctctttcctctttacccatccttgactctcaaagcatctgcgcaaccctcatcgcgactctcaagtccatcatgagaatgcagatgtggtggtgctgaggacctcgccctcctgatgactacaagcaactggaaccagcgcagcctcggaaccaacaaagctgctattatgctgctacacttgttgagcttggttggtatgtaccaatggcatcatctcttttcatattattctgtcgctgacatgcagtttttagtctccaagccttgtcactgaagatcctccagcttgcgagtctccccaatgttgcaaagactctggcttcaatgccatcaagagttccagatcaaggcctggtagggaccgtgtgtggtggtgggcaattatccggttagaacaaccgttacgtattgcgtgtataattgcttagtagtagcttagcttttccaaaccggttgtcgccggtttattccctgatgcagtagctagtgccattttctgtcacctctacactaaaaagaagatttctccaaaattgtcccaactttcggacaaattcgcccggcagttcgtctcaaggactcacgcgttcaaacctcgcagctcgtgtttcttttatggttgacgcgttgacgttatttctcttgttttttcttcctccctccttttttcctttgcattttcttggcgtgcgtgcccttgagcaaagttcaggacatgggttgatcgctgtctttttcttgttttttggagggcgggcttcacctggttgtggaacagcaggtttgtcatcagcaaggctggagtgccgagcgagggcgttacatgtcacaaagggttatatgcgcaaacaaaaaacctttcagcatgtggaaggccgcaacggatgactctcgcggctgtgccctttttcgcttgcacttccctgccactgatctatgcatgagcaagggaggaaagcaattctccagactccaagactgtgttccgaagaaatcagcagcccacgtcccatttcg

SEQ ID NO: 4447 - DNA, 1386 bp, Spizellomyces punctatus
  source 1..1386: mol_type = other DNA
cactgggcagaaagcacattgcgcattgccgcaattctctcatgtcctggtttcctacttgtacgctggaaacattcctcattcgtggcatctcctgtctcacttccaccaagcttagatccatacaaataaacgattcacgaatcgacagacagatatattcaaccaaggccccaacgtatgcctagaagtatacaaaaagtaaagcactacgtacacacaaaatcggcaaccggaaggaaaaaaaaacaatgtcccgaaaaatacagggtcatatgtaacatcctacgcaaatgggaataggaaagcaaggtcggggtcaagtcttgtcgttgtcggctttcgtatctgggtattctggggcctgtcccaagagaaattacaccaatagatacaggtaatttttttaacccttcccaatcgtcatggtttgaatgcaccgtcttttacactccagcgtgcaaacaaccgcgaacaagccttatcataaatacgatgatctccgcaacaggaaatcacacattgtaatgctcgccatgtcacacatttaacaatattggtccaacggtgtgctcttgggttgaatgggactgttcctctcgcaagtcggcgtgtttaactgtgcaactgctgcacgatgcctcattgtttcaaaggaataccacgaaatggccttcttggcctttctttgttgcattatctcaatttgccaatactattggccgcgatttcaacaactccgtgaatatgcgctggagtgtaaaagaccgggcatttaaaccaggaggattgggatgggtcgcaacgcaaaaaaatttccatctatatcgcaccaggagttgaacctgggaccttcagcccggataaagataactactaccagccctaatacatgtgcgataaaccatgctcgttgtttttgtcagtatgttagctagtgagggtatattcctatagggaatgtattaatgatagagaatagggttagggttaggaggacagagtttttggtactagatgtacagatggtggtgcagatgacgagcagcctgcctagtctattggcaataaaaagcgtcacatgcaatacaccagattgcagcaatcgtgacgaaaatcagcccgcataaagataactactatcagccttaatacatgcgcgataaaccatgctcgttgttttcgtcagtagaacagagtttttggtactaaatcctttcttcttgtttggtttcttgagagttgagggtaccgaagaagaggtcagcgggaagagggctgggaaacgcgtttctcgtaggagagcagcaagcaagcaagcaaagcagtgaaagggggggggggggggggccgggggggggcggtttttttttgtttaaactaagc

SEQ ID NO: 4448 - DNA, 861 bp, Spizellomyces punctatus
  source 1..861: mol_type = other DNA
tggcaaagaacagattttcgccaacatgttcatcgaccgagctgcgcagcttgggctacttcagcatgaccccggtaagtaagatctattgttcaagatactggtaatttacgctcatctatatgaacctgacagaatcaagtatcctcactggattcccattgggagttaaaaagaagcttatccatgaggtcacacaatgcctcctacccaactctcccctacttccggatccatcatctctcctcacctctccagcgcacgttcgatgggcgatggaagtcattggacagggatttgctctgccgattgaggatgtgggaataatacatcagactattgccgtttactctaattggttgctggatccgagtactctgccaagtgctatccaggagcggaagggctcggatgtagagcaaaagttttggcaggtcggttattcgcccgatttgccaacacttttgggaattgctaacgttatgtactatccgatagacaatctttcaacaattctctctcctcttccaaccgcgttcacgtaccgagatggcctacagcccctggctccaagaccgctcaaaaaataaacttgaccccgacgacaccgatcccctcacactacacgttgatttgtgccatggagtcctcaaaatccttacatcagcaggacgcgaacttggctcagagttctccgaggagacctggatcgtgctattaaaagtcatgattggaatttctgactgtttgttgcgagagccgatggagaaggaaaagagtgctggagattcccttgccaaaggggacaagcatcagtcgaatgtatatgagggcgaggatgcgggaccgaggatggcggat

SEQ ID NO: 4449 - DNA, 1475 bp, Spizellomyces punctatus
  source 1..1475: mol_type = other DNA
gaaatgaaaaatgattgatgcgaaatggccgttagtggacccggctcttttgtttatcttcctaatgacaatgtcataaaaaatctagttaattggttgcaaggctcatggtatatattgacgtttgtatttacctgcacgctatgtagaaactgagtgcgtctatcaataaatctagttaattcaattggcggcaaggtatggtatatattgacgtttgtatttacctgcacgctatgtagaaactgagtgcgtctaccaataaatctagttaattgaattggttgcaagggtatggtatatattgacgtttgtacttgtatttaccagcacactagtgtagaggtgacagaaactggcactagctactacaccagggaataaaccagcgacaactggttgctaagctactactaggcaattatacacgcaatacgtaacggttggttctaagcggataattgtccaccaccacacgcggtccctactaggccttgatctggaactcttgatggcattgaagccagagtctttgcaacattggggagactcgcaagctggaggatgttcagtgacaaggcttggagactaaaataaattccatgtcagcgacagaataacatgaaaagagatgatgccattggtacataccaaccaagctcaactaatgtggcagcataataacagctttgttggttccgaggctgcgctggttccagttggttgtaatcgggtgggcgaggtcctcggcaccaccacatctgcattctcatgattcgaccgacagtcgtgatgagaagagttgcacagatgcttgcgagtcgaggatgggtaaagaggaaaggggaaagagacagaaggtccccttttatagacctttggcatgcgcctcaccgcagtttaaaaaaaaaaacattacatgcatgccacaccgttttgagcgatagatggggtgctgattattcgatatgattaaccagaataatccagataataacgggtcctagtgccatttccatcaccagcacactatgtaggaggtcatcctcaatcggaaatgctgctgactcatattcaacgtaagctttctcacgtaatcaggtctaacgaacacttgttaaatcgtgagatttacggttttctatctattttcctctgcgacttggaggcgccctttgctggcttctctttcgaaactagccagacagcaaggagaccctatcggtggaggtgctccatgttacgtctttggatttggtgagttggcgtgtttgtgtgcatactctttttggatcgatggatatcagcgcagaaaataaaagtacgatacttttggcgtctcaatgactaaaggatgatatatctcatcgaattgagacgtagaattaatcgtcagttatatgaccgttctcacattttgacattttatgggtgcatattgaccccttcagagccattctttcgcgcatccaggt

SEQ ID NO: 4450 - DNA, 612 bp, Spizellomyces punctatus
  source 1..612: mol_type = other DNA
gtgagtggacgtcttcaaaagctacgaggctgcagctcctaccttcgcgcccacactggtctgcttgtatcctttctgccgaaagacgcctgagccataagcaaccgcgtatctcactggtgcattaaagtctgctagaactgcgtgtagtttttcatcaagttcaggatgggaggccgtgctggtttctcggagtacatgacttgcgtgatatcgcctcgatgcaattataagacatgagcaacgtccgcgtgcagtagtgccgtgtgacaatccctgcaaaaggtcccgtttcactccagcaacagtcgactttctacagaagacgttcatgtttccgcgatgacactctgcttgaacactgtggggtcgtcattccattctcacagcctgtcacatgacatatcacgtggtgggcatattcatctcaggtctagcgtatattaacctactttggcaaaatgtttggtagtaacatcaacacccggcgtggctttacaaccagggtgaaatcaaggctacgccttctccatgcaggatgaactagatgcagatcatggaatgagtttcttttccgaacctcgtcagggcaatgatttgttcttgacgagc

SEQ ID NO: 4451 - DNA, 692 bp, Spizellomyces punctatus
  source 1..692: mol_type = other DNA
taggttaccagtgtcgcgaccgactcgtcccgctctgcatgcaatttcccaagtctcttaactctctgtggaaactcctaattacttgaactgtcccctatgctaatcagcttcctttcgtgcaataaaggtctccaactcttagattcggaaagtggcatattatttcattttcttcgagtatggaacaggtttaagtgatagtaattccgactatattagtgtgcaggacatggataatgtcacctggttttagtggtttaaatgaaaggaataaatgcgattaaccaccccgactgcgcattgattacgtagtcatgtaattgctgctactatggcaacatcggacgcaattggagagtctgtcataaggtcattcattgcacaccgagttccctggacgaagggacgactaaatgcaacaaaatcttgagcctgccgacatagtgccgcgcctcacgtctacggatttacctgacttgttatactgtggtgaaaggtcgttatcttggctgtgcgaaggcacaagcgagttgaacacaatcttgcgctcgttgttgaagtaagagcttttgacttgcgtctgtgacgttcaaaacttattccaatcaattgtagcactcgtcaatgttaccttccaaaccccagggaatactatcagcaaccgttccggccacgtcttctttagaccg

SEQ ID NO: 4452 - DNA, 1598 bp, Spizellomyces punctatus
  source 1..1598: mol_type = other DNA
gtgatatttttgacccgacactaggtagaaatgtagaatagcggtcaggatgacgcgtaagtagtacatagcttctgctgttttccattttcattccacaaagcccgtcctatatgaacttggtcggcttttgaaaccgacttgcgagtttcaatgcctgacttgagaagccttccaaccttcacacggggcatgcatatcgctcctcagcgtttatgtgtgaagatagaggccaattgcggtaaagggcatttattccaaacagaaaagctacggtgcctcatcaagagccctggcattcttttgtgtacaccaagatcatagaagcgtaggtaccgtaataagtccatgctgaaaataggcgtatgagccaatcaaaatgtattctcgtcggcaaagcaatccacagattctaaattaagttaaacccaatatccgtaagctccgacatagtgtggaggtgcttgaaaatggcactaagacccattattatccggataatccggttaatcatatcgcataatcagcacccccatctattgctcaaagtggtgtggcatgcatataatgtttttttttttaaactgcagtgaggcacatgccaaaggtctataaaagggggccttttgctgtctctccccttcctcaccagctcctcgactctcaaaccatctgcgcaacactcatcacgacccacattgcgactcagtcaaccatgagaatgcagatgtggtggtgccgaggacctcgccctcctgactacaaccaactggaaccagcagcaaccactcggaaccaacaaagctgctattatactgccacattagttgagcttggttggtatgtaccaacagcatttcttttcattctgtcattcatcttgctgacatgcagttttttatagtctccaagccttgtcactgaagatcctccagcttgtgagtctccccaatgttgcgaagactctggcttcaatgccatcaagagttctggatcaaggcctaagggatcgcgtgtggtagtgggcaattatccggttagaaccaattgttactgtataattgcccagtagtagttagttagttagcttttccgaaccggttgtcgccagtttattccctggtgtagtagctagtgccagtttctgtcacctctactctataaatgtctcccatgacgcgtaggtataattccaagatctttaattttgcaaatggaaagttccaaacgtgctgattgtctgctacagaagcctcgtttgactttctggcaatgccacagctagcgaccattgcaagtaaacagcagtctacacagaacacaatacctcacgccgcgtttatgttgccactgatgccacaattccttgcgtcccggctataggaagtccttgatatgcaattgggtctcttcgcagttgagggccggagaatagggtaccgtcaagttgcgactgttacttcggctggtctaggtatgggagtataccattcgtctacccctacttacgccccgttatgatacttacgcaacacccatcaatatactgttccgctagtcatgagcgagtgccctcgccgttatatatgagtccctca

SEQ ID NO: 4453 - protein, 65 aa, Spizellomyces punctatus
MSSQVFDGPAPDTLEPTTLAHLPAPTTEPARLILLGLDSPDAEPLLKYTFTHLLKPNDTLVILHT

SEQ ID NO: 4454 - DNA, 716 bp, Spizellomyces punctatus
  source 1..716: mol_type = other DNA
gaataacacccatttgcatgtaaatgttgcgcaagatgcatgagtgctttcgataaagcgtcaccagggaacatcatactggtgctgaaaagcggtgctcaacatgctgtttgcaagtttcaagtgaaatctacggcatggttaacgcctcaaaacctgtgatctacggatgttggtatgtacatcaaccagaaagtctttcggagaaagttcatgccaaccgttccagccccgtaccgatctatggattccttgagtattcaaaccaaatgtctgcaatatcggttggacaaacgttggaaaacacatcccaaaccagaagtgtcaaacgatgggatgtatcacgtgatgggcattacgatgtaacactttccccaggctagacaaaaactccagcccatgttggttcgtcactcgtttggcgaccgtccattcacaaattgcaacatgtcgaagcagggaccactgaagcgaaaatccaagggtgttcttcccgacaatgctctttcaattacagagcgcatcttttatcagtcggcaccaggtcgaccacaggtgacgtacggaagggcaagggcatcttcagggatttgtattaacagtcatcttctcggtctcgtctatacaacaatgggttcctccaggtcataatgtcctttctgttgcgcctacaccttccaccgcaaacgccagacgtatcaatcccacggctcgtc

SEQ ID NO: 4455 - DNA, 1523 bp, Spizellomyces punctatus
  source 1..1523: mol_type = other DNA
ggtgtggagaataacgagggtgtcatttggttttagaagatgagtaaaggtgtactttagcaagggctctgcatcgggtgagtccagcccgaggaggataagtcgtgcgggctccgtggttggtgcaggaaggtgggccagtgtggtaggttccagagtatctggagcgggaccatcgaatacttgcgaggacatgtttgcttttgttttgcgcttgctattaggagtgcctctgtaaagaagggagagcagaaggaaggccttttataaagcggaagctacaagatgccagtacacagcaagacgcagcatgactcatcgaccgtgtcataatcggacgtgattgaaaatggcactaggacccattattatccggattaatccggttagtcatatcgcataatcagcacccccatctatcactcaaagcggtgtggcatggatgctaatgttctccaaactgcggtgaggcatgctaatgtaacgttttgtctttttcagctggaccccattttgccacaatcgaggtctataaaaggggggccttttgctgtctctccccttcctcaccagttcctcgactctcaaaccatctgcgcaactctcatcgcgactcggtccaatcatgagaatgcagatgtggtggtgccgaggacctcgaccgcccgacagcaatcgtgatcagaaccagcggcaaccaattggatccgataacaaaacctactattatgctgctacacttgttgagcttggttggtaagtaccaatggcatttcttttcattctgtcattcatctcgctgacatgcagtttttagtctccaagccttgtcactgaagatcctccagcttgcgagtctccccaatgttgcgaagactctggcttcaatgccatcaagagttctggatcaaggcctagtagggaccgtgtgtggtggtgggcaattatccggttacaaccaaccgttacgtattgcgtgtataattgtctagtagtagcttagcttttccgaaccggttgtcgccggtttattccctggtgtagtagctagtgccattttctgtcacctctacactaatcgacaaaagatgtttaacaaaatatgaatatcgtgcaaagaaacgtgctcgcaaaagtgttttagcaggttggtctggacaagaagttttgttggattcgtttggattggcattgcagctggctgagttccggcagcaaagcacgaggtggatttgtctttgacgttgtatccaacagagcaatgaaaccacaaggccgtgacaggcgagttggaagctcatcttgcgcttgccatcctcttctcgatgtgggcttgcaaggatgtgaacacttagcgtcttttcgtaacttgtctttgcactctaaactatcggattcctcctattcaacagcttatcaatagctgaaacacagagtcttcaaatgcagtaaggcatgtctggttaaagattattatagcgtacaaaatggaaggatgctctggggtgacctaaaacatcact

SEQ ID NO: 4456 - DNA, 1118 bp, Spizellomyces punctatus
  source 1..1118: mol_type = other DNA
acatttctgatctgtaatccactttgcctcttaaatgcaaaatctcgcatctctccttcagtagatccacaaaaggactgtgatactcgcggtgaaaaccacccttgtacaggtctgttaacattcattgtaagcgataaaatctggaggtattcgctttattggagtctaaccttctggagctctgttggatgtggcaaccatcaccgctcccagtttgaacatgttcttgaagacttgacgcatgacagatgccgttgctacgtccgtaatttggaattcatcaaagcacaaaagccacgaatcgcggaataaatcgcgagcaacaagctcggtgacatggaggttgtttggacgagaccgcttgctattcgaggattcactcagattacattttcatcgcccccgcctcgcgtaaacggtcacttacttccactcatgaatacgggcaaaggctgacaccgtaaaggcattaaaatgcactcgtttttttctttgtataggtaccgactcatagaagaggtccattgccatggtctttcccgtgctgatgattgaggaattgatattcactcgacgggtatgaataactacctgcgcaaaactaacccaacctccccatgtatccatagtcctttgggtccgtgtacctcctcttcgtcagctaagcgcaccacatcccggctctcatcattaggcgttacgatggcagatctggcaagaagcgtgactggtgactatgatttgaattagttttcttttgaaaatcattaaacgagatcttcacattctaacctgctcactcaggtctgaaagttcgggtggttcataatcaaggagatcctcacaaagtcgttgaagctgcctccaagaaataagtcgtccataaccgttctcacttcaccaggcaacttacacacctcaacaattgtacgcatctggtcttcatctggacgtagtcgcttttcggagaccaggcgaaaatattcggaaaggggtccttttacaatttcagaaccttattatgctattgaaataacgaagattacaattggaacatacctatctgtctaaggcccgattccgttgtcaatgacttcctcacgtttaaccagcct

SEQ ID NO: 4457 - DNA, 640 bp, Spizellomyces punctatus
  source 1..640: mol_type = other DNA
atcccagcggtttgttccgtctcgacggtgcgaaccaggttcccctcaccgacatggttcgagggcatcccacttgaaagaactcaagtatttgattgccaagaacctgagtgccgagtccaggctgcacatcaaatatgaggcagctgcatatacggcatggagagctctcgcgcagctggaggaggagcatactacgatcacgtcatagttgaagcgagcagatatccaggtagaacgtagtaaaacaatcaacgaatgatgaaactctttgttgaacgggatttgccaattgtcgatcaggacatgaccaaagcgacaacaaaaatcaatcagtatttccagtggttgaagttttcgaagcttttctggaaaagcagtgatgttgcttcggatcttcgcgagaattatagtaatgatttgctacaagagactgagctacgggtaacttttgtaattgtcatacgtgccgcgtttttttgtcctcccgactaatagcttacttgtctgatagatggcatactctttgggtcggttgcatgaagatacgcaccatctgtatttggcaattcgcgctaccttattggcatttgcttcatcaacagacctctcacataaaaccatcacacctgaatttcaa

SEQ ID NO: 4458 - DNA, 1475 bp, Spizellomyces punctatus
  source 1..1475: mol_type = other DNA
actgatatgactgggcgacgatgccatagcggccgtcgcaggctgcagatgcgcatctttgacctttcgacatgcacttgtcaaagatggttcccaaaatggatgcctgcaagcgggaattggttgacatggaacgaacggtaaggtggaggacacggttgaaaagggcaagagcataacgaggttattgaaaatggcactaagacccactattatccggataatccggttaatcatatcgcataatcagcaccccctctattgctcaaagcggtgaggcatgctaatataatgtttttttttaaactgcggtgaggcgcatgccaaaggtctataaaaggggaccttctgtctcttccctctttcctctttacccatccttgactctcaaagcatctgcgcaaatgctcatcatgactcagtccaaatgagaatgcagatgtggtggtggcgaggacctcatccacccgacagcaacagcgatcagagccagcagcaaccaattggatccattaacaaaactgctattatgctgccacatttgttgagcttggttggtatgtactgatggcattttgttactctgtcatcgggtcatcttctgacatgcagttttctagtctccaagacttcattactgaagatcctccagcttgcaagtctcctcaatgttgcgaagactctggcttcaatgccatcaagagttctggatcaaggcctagtagggaccgtgtgtggtggtgggcaattatctggttagaacaaccgttcgtattgcatgtgtaattgtctattagtagttagttagcttttccgaaccggttgtcgccggtttattccctggtgtagtagctagtgccagtttctgtcacctcaacactaacgaggttgccggtcacgcggtccgtgcagcaagtgggacgatattacagatatgaaattattgaaattacatggctcgcccgtatccaccataaaagcttctttacaatgattgtctcgtttccctatgcgatttgttgttcgccatttttcaacaaagacccagattcaaacccctttacgtacccaacggccttacgaaccaccttaaatctccagcctggtcctccttggtcaagccgcattaaccacgccctcgctgacttactgctgcgagttaccggtggatgtcaccttaacaccaaacccacgcaccttttctaatgactctcccagtggccggcgagagtagcacaggaaaatctgacatcttggatgctttacttaagaatccatgatggctctatcaagggaaggagtgaaggaatgttgagaagggataggtaaggatttttcgttcaagtttccactttaatgacttgccattggatgaagaggagtttaacattgcaatggccaacgtctcagtgcgactcaaaacgatcgctggctacgataagaatacaaagttgacaagggtttccacagttagt

SEQ ID NO: 4459 - DNA, 195 bp, Spizellomyces punctatus
  source 1..195: mol_type = other DNA
cagtcctcaacacatcgcttttccgccgtaagtttctttcatgcgcgataggcgccaattaccagcggaaaccctgcattcgcataatacgtttgagataagaatgtccgtaaactattcccaaggtaaaatctcgcaaagtttctcccctgactttattcacagttgcacttggattggtcgcaataaaatatg

SEQ ID NO: 4460 - DNA, 189 bp, Spizellomyces punctatus
  source 1..189: mol_type = other DNA
atcaagcggccgacgcgcatcaaggatgtcttcgattgtttgcaggattcgagatgatgaagcgtctgggctactcatgaacgagtcgcacaaatcatatgtcgacgtagaggtggttgttgtgcttgttgacgttgggtctgtttcgtccggtgcgggggtaatggtgatggtctgtgcgatatcgga

SEQ ID NO: 4461 - DNA, 1523 bp, Spizellomyces punctatus
  source 1..1523: mol_type = other DNA
aaaaccagcgaggaaatggatcgtacgtggcgcacagtaaaaaaatgcatacaacaaatctagaaattccattgcatccaacgaggtaggtgcagcattacggagcaacagacccattctggtacagcatcttgctcatctccaacagatggaacgcgtcaaaatccaggacagctcgacagaaaggacgttgcaggccataatacagatttgtgtagcgcagacaaccacaaaactgaggacttcttatcgaaatgtcctttttaaacggatacaatatttcagatgtcaatcctgaaatcgatatgtgtatataatttgtagatagcaatattatcccgttaaccattaccgcagtcctatgctgtcatattcatagtgtgaacgtggttgaaaatggcactaggacccattattatccggattagtccggttaatcgtatcgcataatcagaacccccatctatcgctcaaagcggtgaggcatgcatgctaatgttctccaaactgcggtgtggcacatgctaatgtaacgttttttctttcagctggaccccattttgccacattcgaggtctataaaggggggccttctgtctcttccctctctccccttcctcaccagttcctcgactctcaaagcatctgccaaacgctcaagcaactctcaagtccatcatgagagtactgctctggtgctgaggacctcgccctcccgactaccagcaactggaaccagcgcagcttcggaaccaacaaagctgttattatgctgccacattagttgagcttggttggtatgtactgatggcatcatctcttttcatgttattctgtcactgacatgcagtttttttctctagtctccaagccttgtccctgaaaatcccccagcttgtgacgctgcccagtcgattcgctcctggatgcaagagtctggcttcaatgccatcaagagttctggatcaaggcctagtagggaccgcgtgtggtggtgggcagttatccggttagaacaaccgttacgtattgcgtgcataattgcctagtagttagttagcttttccgaaccggttgtcgccggtttattccctggtgtagtagctagtgccattttctgtcacctctacactaagaataagtcactcatacatcatgaagctatcgccaagctgttcaccgcggcattctcatatctcatccactcctaacgccacagatggtttaccaaagtttgcgtcaaatccaacagcgccttccgcaaagaaaacggcgccgtcagctcgcacatccttacgctttccaaagtcaaaggcaaaagcgctagagcctgtttcatcttcattcattcccaaaagaccgtagcgccgccaacgcggtgaaagccttaaccaccttgtcgagctaccagctcgtaaaccggctccatgtagtatgctctcaaagtttttcagattgcgctgggagaggactatataaaatgggtccatgtctgattttgtcatatccaatcgacctgtttg

SEQ ID NO: 4462 - protein, 490 aa, Spizellomyces punctatus
MARPRKVFAEQPRPPTNIESKLENLARLAKTGRRSRAQAPDEAPISRNGRPKRFSVDREDSDEAAGDSFHNGNELPAATLGKRYRQDDADLQSMEPATRRRVGVRAEENYYASAKWSQFPQHDAMMAQRSSLSHTITQDYNPKDYNIPPYFFLSKDGMIATFTWHPPKRVRFRSQYSWKEQGRILTICSDIQSEENTYQEYDSVKAPRLLSFLRSHLQKCIRRTNGQLAYRTAYQLIKPDAAELIRQLPMIVLEDAIPNPQYPGLIWLACATEKGFRPPISIIEWLLGYVRAVADSPFRETFEASASSDPLQLVSRSVAELPTSKRDLLYALQLTKSLQTSAGNRFLIDKTTRAWFERMRSDSNDNHYSKTLYQVHHVPIDGVPNLQPDELELSAVDPCCSDILDILRQELDEEDQQRWPDDVVLKHMLNEKSCELRTKMLVPAVFGGSESKSAEKPPGVNRMEVDLLWRKYKEKISQAQRRILRGAISK

SEQ ID NO: 4463 - DNA, 1065 bp, Spizellomyces punctatus
  source 1..1065: mol_type = other DNA
cagcactatgaacaaaagcgctaccagtctgaacaccgcatttggagctcacctgccgatgtctgtaggctttttgtcagttgaagggcatagagcaggtcgcgcttcgatgtcggcagctcagcaaccgatctggacaccagttgcagcgggtcggacgaggcagacgcctcaaaggtttctcgaaatgggctgtcagcaacagccctaacatatcccagcagccactctatgatcgatatcggtggccgaaaccctttctccgtcgcacatgctagccatattagacctgcagaagcttattgagtatgaagccacgtcaaatttagcctttacataccaggatactggggatttgggatcgcgtcctccaacacgatcattggtagctgtcgaatcaattcagcagcatctggcttgatcagttggtatgcagtgcgataggccagctgtccgtttgttcttcgtatgcatttttgcaaatgagacctcagaaatgagagaaggcggggagctttgacggagtcatattcttggtatgtgttttcttctgactggatatcgctgcagatctgtaagtacgtggaagcggatccaccacttagatgactatgcgtgtgggttccgaatattatccaattataccgtaagtatccttccttgttctttccaagaatattgagaacgaaaacgcacacgtttcgggggatgccaggtaaaagtagctatcattccatcctttgagaggaaaaagtatggcggtatattgtagtcttttgggttgtaatcctgtgtaatggtatggcttagagaagatctttgtgccatcatagcatcatgctgcggaaattgtgaccctataacagcatagttgaataacatgcgcccctttccctcaacagatgtcgtgtctgacaccaactgacgcggatgtcaacttacatttcgcagatgcataatagttctcttctgccctcacaccaacgcgacggcgagtggctggttccattgattgcaagtcagcgtcatcctgtctgtatcgcttcccaagtgtcgctgctggta

SEQ ID NO: 4464 - protein, 411 aa, Spizellomyces punctatus
MSSSTDASSSPINIRFRLAPGLGDVGTDITLRVTDPEKETLAELKAQLASRVNVPLDEIRLVYAGRVLKDDEESVSSLGLKDGITVHATKLARNRAAEEASTAAAAGHNVPGAGGAARNAFGLPDMSALLENPFVRSMLENPEFMRTMLENDPRIARLAESNPSLRQTLNDPRFLREMLDTMRNPALSQEMMRNVDRQLLNIENIPGGFNALSSIYHDIQAPLSQMREEDTSTDEANRRFAELLGAQQRSSSEGINNQALPNPWAPPPTTSPTSNSASLPSSPFTAPFGNPALFNSLNFLQPPSTAAPNTPSSTTAPSLAAPHFDFGSMMQQIQQLQGAFQPFEPLTASTAAPAQPQVEPQSLTESHEERFAEQLNTLRDMGFEEKDRCIRALLAAGGNVEAAIAYMLDSP

SEQ ID NO: 4465 - DNA, 556 bp, Spizellomyces punctatus
  source 1..556: mol_type = other DNA
gagaatccagaatttatgcgtaccatgttggagaacgacccaaggattgcacgcttagctgagtcgaatccctctcttcgccaaacgctgaatgatcctcgggtaatcgtcaaagcgaaaattaattggatctggcgaatgtagctgacttttgtcatcgatggtgtagttcctaagagagatgctcgacactatgaggaaccctgcattggtttgtatgccgtcctgtgggctttgcatgtcgtgattgctttaaccatctaatatcgtatgaaaaatttagagccaggaaatgatgagaaatgttggtatgttacctcggatgccttacttctggaatctggatttgaaccaaaagtgacatgacgtgaggacagacaggcagctgctgaacatcgaaaacatccctggtggattcaatgctctaagttccatatatcacgatatacaagcacctttaagtcaaatgcgggaagaggacacgagcacaggtgcgtccaataatcaaccagtcaaatagacgtgtttgaacgtctaatgaagggattctatagac

SEQ ID NO: 4466 - DNA, 1612 bp, Spizellomyces punctatus
  source 1..1612: mol_type = other DNA
gttcatttccattgtgaaaactatcacctgcagcttcgtcgctgtcttctctgtccacggaaaatctctttggtcggccattgcgggagataggtgcctcatccggagcttgagcacgagatcttcgtccagttttggccagtcgagcaaggttctctaacttgctttcaatgttggttggtgggcgtggttgctctgcaaaaactttgcgaggacgagccatctctcttttgcaaccgtcgttgagatttccgaccccaggagcaagatccgtggcaagtcttgaaaacgaacaaaagctctttggatcttcccttgcaattgttaccaagaaccaaacgttccagaaattcaaatgactaatgacgcgtaatttgaaacgctgtttgcagtacatagtgtggagctgacagtaaatggcactagtacccattatcatccggatcaatccggttaattatattgcataatcagaacccccatcgctgaaagacgtcctgctaatgttctccaaactgcggtgtggcatgctaatgtaatgtttttttttttttttttttttcagctggaccccatttgccacactcaaggtctataaaaggggggcctttcctgtctcttcccttcctcaccagttcctcaactctcaaaccatctgcgcaacactcatcacgacccacattgcaccttgccctgccgatgactacaaccaactggaaccagcaacaatcactcggaaccaacaaagctgctattatactgccacattagttgagcttggttggtatgtaccaatggcatcatctcttttcatgttattctgttactgacatgcagtttttagtctccaagccttgtcactgaaaatcccccagcttgtgatgctgcccagtcgattcactcctggatgccttcaatgccatcaagagttccagatcaaggcctagtagggaccgcgtgtggtggtgggcaattatccggttagaaacaaccgttacgtattgcgtgtataattgcctagtagtagcttagttggcttttccgaaccggttgtcgccggtttattccctggtgtagtagctagtgccagtttctgtcacctctacactagaaacagcctacacagagattatgtctagctccactgatgccagttcatcgcccatcaacatccggttccgtctagcacccgggctaggcgatgttggaaccgacatcacacttagagttacagatcctgagaaagagacacttgcagaactgaaagctcaactggcatcccgcgtcaatgtaccattggacgagatccgcctagtttatgctggccgcgtgctcaaggacgatgaagaatcagtatcgtcgctcggattgaaagatggaatcacagttcatgctacaaaattagccagaaatcgtgctgcggaagaagcaagtactgcggcggcagccggtcataacgttccaggagcaggaggcgcggctcgtaatgcttttggacttccaggtggctgcagcgatagatgtaacctggcccttaacaccgaaatctattaaccgtctgcaaatagatatgagcgccttgttagaaaatccttttgtccgaagtatgttg

SEQ ID NO: 4467 - DNA, 974 bp, Spizellomyces punctatus
  source 1..974: mol_type = other DNA
aaggatcattcttggcagcagcagccaagatgacccccgtatagcgaccaaagatgttgaagcagttttcacccttggatccctgcgcaccattcagggagttgcaaaaagctgataatttgtttttggcttgggtagttttctgtttaaacgcaacattgtttattcccaagtggacctttatcaatgacttcaagtacatacaggatcttcgacggcggcaacggaggaagccaaagcaaggcatgcgaccacgacggtagtgactttcatgttgggattcttctaagttctttgtctatgtgtctagcaggtatatatatcgaggagtatttttcagacggggggagcgaaagggaggatgacatgctctctttaaataactcagctccccccaatgtcatccatcgtcattccctcagcaaaatgaaaagattctgtagaaacctcctttgtccattagaaaacccgctttttgctgcgttgcttatgaaacgcgcctttaactccaaattggtttttgacctgaaacgcggcggactttgaactttttgacagatgctgcgttaaccgtttgttacaaacaccgagagcctttgggatgggtttacttttgatattcctagtgtttggaagggaaaagaacgggttttagatcagcgcacaaactagttggttgatgcgattgcgcagtaaagatgaactttgggggtgtctaccaaagttgaaagggtccccttaagggtttttaacggccagctgagagatgaaggactaaaaatgcggcagatttgttttaatgcacctgctgacggcgaaaggcggctttcaacctgcaaccggaatatgatcccttgctgtcttttccaattggaaagcgactggtcgatggcgggttccttgtcgcgggctctttcgatggctctgcttcttccagaggaccacgttctcgcttgcaggtcatttgtcggttt

SEQ ID NO: 4468 - DNA, 1235 bp, Spizellomyces punctatus
  source 1..1235: mol_type = other DNA
tcggaagacaaagaaaaagattcctgatctacgggttttcgtctagtatcgtcgagttttcttttttgcgggtaccttccttggagtgatatctacccttttggcagctgcaacttttcgaccagcactgaaaccgataatgcccatgcatcgaatgtcagagttattttctggtgctttgggagatgtggatctgtccgagttccttcccgagattcccggaattagttcatatgatctcttgggaaacctgacgtcgatgtttcagattccatcactttttggaggcacaaaggtgggatcgcctgctaccgagtatgagcagtttctgcctggagcccgactagctggagaagggctcgccgcaaaggtaggattcacttaatcggcttgctgtcacctcgaatgtagatacagatgattttgcattggcaattcagcaccctgtcatccttatccctggcattgtgtccacaggacttgaagtgtggaatatccctgtctcgcctaaaactgacagtcctctcgacacaaagaatacgggagaggcacaagatcaagctggtggccgtgccaaaagaaagccccaggcgaaatcaagtgaatcaaaatctgcacctgccaagcaaaccacggatgaagcggccgctgaggagatcattgcaatgaaccgcgcttgtgggcagaaatattttcgaaagagaatatggggaaccacagatcatttcaaagctctactgttgaacaatgcgtgctgggtatatcatatgatgctagatgagacgacagggctagatccgccaggtgtcaaattgagggcagcccagggtcttgatgcggcggactatctatttcctgggtatatatttcttttagctttcagttatctcatttaagaatgtttgcttatctgacaccaaacgttaggtactgggtctgggctaaacttatttccaaccttggagctctcggatacgacaacaacaatagtacgcattcattcccacaagagtaagctgcatttatgtcatctcacagttgatttgcatcctgtagtgcacctggcagcctacgactggcggctcagctttgctaacctcgaaaaacgcgatctctactttaccaaactgaaaaatacgattgaaatctcgtacttgcatgcaggcgggggacccgatgcccgatctgttgtcgtgacccactccatgggctcaactgtttttatgtattttatg

SEQ ID NO: 4469 - DNA, 1605 bp, Spizellomyces punctatus
  source 1..1605: mol_type = other DNA
acgaccattcttatacattgtttgcttcagcgacatgtgccacgcaaaaggatacatcgctggcctgtaaggtccagtttattgcaacccatatgaaagccgtaatgggccgtgtgcgtgtgtgcacttgtaatgaacctcgcaaaacatgaactgattccatcccccttgtggataaaatacaagggaatccaattggaaacggtgaatagcgcacgtctgccgtcgtccaactagagtcgcccatctgcatttcctcatagcataatgccataacacgataaacggaacgatatgcctttacaatgtccttgttttttgttttatccgtcgcctttcgcaaagtctagctgtcaacatgtccaatacggtcgagtaacatagtgtggaggtgattgaaaatggcactaagactcattattatccggataatccggttaatcatatcgcataatcagcaccccctctattgctcagattggtgtggcatgcatgtaatgtttttttttttttaaactgcagtgaggcgcatgccgaaggtctataaaaggggggccttgctctctctccccttcctcaccagttcctcgactctcaaaccatctgcgcaaccctcatcatgactctcaagtccaaccatgagaatgcagatgtgatggtgctgaggaccttgccctcccaatgactacaaccaactggaaccagcgcagcctcggaaccaacaaagctgctattatgctgccacattagttgagcttggttggtatgtactgattgcatcatttcattctgtcattcatctcgctgacatgcagtttttttatcctagtttttttagtctccaagtcttgtcactgaacatcctctggcttgtgatgctgcccagtcgattcgctcctggatgcaagagtctggcttcaatgccatcaagagttccagatcaaggcctagtagggaccgcgtgtggtggtgcgcagttatccggttagaaccaactgttatgtattgcgtgtataattgcctagtagtagttagttagcttttccgaaccggttgtcgccggtttattccctggtgtagtagctagtgccattttctgtcacctctacactgtgcatttgacgtcatgcctcaatgggagatgaattcgaataaatgactcgttcgatgagtcctacaccgctgagtcacactcaatgcatggcctctccgcttggcaatcgcttgcgttccacctaacgacacgcccgtggacggtactcgtccctttgtcacagtcctgtaccaggtagcgcactagcgcgcttccattgaaaaaccaattgcgatacccatccggcgacgatctcggaggcgccttccagtgcgacaaccatggctggacgcaacagaaaggcccaaacaccaaagcgtcatcacaagcggaggactggatcgccaagacggcagcctcatgttgatgagacggttgcccttattcaatcacagagtcgtgatgctgatacgcgcgtgagatctagaagaaggagcttcatggatggtcctgttggacgcaagtttttggaggtacattgcgttgatgtttgcgctagaaagggcatagtc

SEQ ID NO: 4470 - protein, 268 aa, Spizellomyces punctatus
MAEAVLASSTSAHLEPFLLLSKNAKGAACVQLIQDALSAPGVYVFSELLEMPTVQELSQNPEQEPYVNLLRLFAYGTYQDYRANAASLPPLNDAQLKKLKHLSIVTLSGDNRTLNYDLLLQYLDIPNVRELEDLIIDAIYQDLIRGKLDQQKKCLDVEYAMGRDLRPGQADRILVVLGAWARTSETILTNIDEKIGHITQWNAMHAREQEEYEKLIEQTKKEVREKGAEKHNRPAPPDFSDFGEYAEEGGRKAGKRSSKGRYGGPSRR

SEQ ID NO: 4471 - DNA, 926 bp, Spizellomyces punctatus
  source 1..926: mol_type = other DNA
agttccgtaatagtcagagcacgctagcaattttgagctgtaggttccaagtagtcagaatagaacaggagcacgttttattatccacgtttaaacaaagggagagaacatcatcgccggctgggtccgccatatctccctttactggacctattcgtagctgcagttaatcaaagtccaataaacaaactaaaatgtcagcaaataccttttgccggccttccgccctccttcctccgcatactccccaaaatcgctgaaatctggcggtgcgggtcggttgtgcttctcagcacccttttcccgcacctctttctttgtctgctcaatcagcttctcatattcctcttgttctcttgcgtgcattgcgttccattgtgtgatgtgtccaattttctcgtcaatatttgtcagtatagtttctgatgtccgggccctggaagatttattagtaatccgcccacgcatcaaactaacaggttgacataccaggcacccaagaccaccaaaatcctgtccgcctggcccggtcgaagatctcgtcccatcgcatactctacgtcgagacactttttctgttgatccaactttcctcttattaagtcttgatatattgcgtctataattagatcctccagttctcgcacgtttgggatatcgagatattggagaagaaggtcgtagtttaaggtctgcaaaagaacactcagttcgaaggtgaacatccggaccgctgttgtggcctaacatacgcggttgtcgccagacaatgtgacaatggacaaatgcttcagtttctttaattgcgcatcattcaacggaggtaaagatgccgcgtttgctataattccaagcatcagcacaaagaccgggttgtgatagcatcatgtacaatgcacacctctataatcctgatacgtgccgta

SEQ ID NO: 4472 - protein, 864 aa, Spizellomyces punctatus
MGGDTTESLVPSSKTPQWVIGVCAMDTKARSKPMRNILNRLLSSGDFEAVVFGDKVILDEDVENWPSCDFFISFFSNGFPLQKAIDYVQLRRPFCVNDVPMQQVLWDRRLVLQILDAVNVPTPRRLITHCGDDPVVPQNTLDRLNKLGIQIPTGPQPVVHAEMVDEDTIRVGDQLIKKPFVEKPVSGEDHNIFIYYSRAMGGGVRKLFRKVGNKSSEFCPELVEIRTDASYIYEEFMNVDNAEDVKVYTVGDRYNHAETRKSPVVDGIVRRNAEGKEIRYVTPLNPEEVEMAKRVTLAFGQTVCGFDLLRTNGKSYVIDVNGWSFVKGNDDYYDKCTTVLRQLFLEHAATVQPGKLHKEPSIENQWKLKAFLSVLRHADRTPKQKMKFIFRSPPFMDLLDKGEGEMVFKKPEQLQRVSDACRQALEEGLEDKSILEQLREVMTAKAHLSGTKAQIKPLFNKASRMVDKVQLIVKWGGEFTHGGRHQTKDLAENLRKDLKIINRDLLEDVKIYSSSEQRVTATADIFIRSFLHLAEAPQNSIVVSKEMLDDSNAVKEQTEAVKVRLQEILNPNHSATLPLNDLPPDVNPPTYVQDMIDILKTLRVTMRENYERLEVESIQRRWCCAETPWLFKERWEKLMKDFCDVERSSFEPSKVSELYDSLKYDLIHNRDFCEAIFASEVHGRDLLKQLYYKSKVMFDFVAPREYGIEDNEKLEIGVLSSVVLLRQLVADLQAARSSPKPSTRFYFTKESKIISLLNIVLLCGLPTRVEKVDELDYLTQITFELYERHRGLGADDPDTSEFSLRIGFSQGAHSPNLIDLHLDSRHSLSVAPRIWISDHVSLDEALGFLTPRISGSNSPKEGRR

SEQ ID NO: 4473 - DNA, 619 bp, Spizellomyces punctatus
  source 1..619: mol_type = other DNA
aaaaagccgttaatcttttgcctttgaatcgatgctgaaattggttgcacctacatcctgggtgcaacagatagagagtgtcgactatccagatgcaaatcaataaggttcggactatgggcacctttggtacgaagtaacaagcattagcaattacaatcctacattcttgaacctccatgctgctttaccttggctgaacccaatacgaagtgagaactcgctcgtatcggggtcatccgcccccagaccgcgatgacgctcatacagttcaaaggtaatctgagtcaagtctgcacgacgacagcaggtgagaaacgtttgcaagggaatatgttaatattccaatgctggtacacttacagtcaagctcatcaactttctcaactcgggtaggcaaaccacacagcaggacaatgtttaaaagagaaataatcttgctctcctttgtaaagtaaaatctggtgctcggctttggtgaagagcgcgccgcttggaggtccgccacaagctgtcttagtaggacaacggaactgagaacgccaatttcaagcttttcattatcctgcagaataaaactttaattattaatcaacaaattctggcatcccagtcaagc

SEQ ID NO: 4474 - DNA, 1605 bp, Spizellomyces punctatus
  source 1..1605: mol_type = other DNA
tgcaaacagacgaagaagattcacgtaaggttcttgctcgggattttgacttaactgtgcaactgcgtcatcaaatgtcggtgataaccacagtctacatgcatgcaccaaatcgcacctcttgcaccgtcggcatttccagaagctctgaaaagacatacactccgggagccgataaggcatcttgaataagttgtacgcaagcagcgccctttgcatttttggacagcaataggaaaggttccagatgtgcggaagtggacgatgcgagaacggcttctgccattgttgaagtcaacgatatggatgttgacggcgtgacagacacaaccaagtggctaaagatactccggtcactcttcgcactgcttctgctgtatcagggatctcaaagcttttcggtacttggtagtgccagtagtaaacggaaatcgcgagatctctagtcgaaatgcaaacaacttaggagatgatacaagacattggagtttctatgtcgagcaaaactatcccactcgagcacataccactgtcagatgccctttctcctcggtgccgatagcaaagtcatcaagagcaaggaaacgcaatgagcttggggaaaggcatcgtcgatcgttgagtcatcaatcacgtggtgtttgcttacaaagtgtggaggtgattgaaaatggcactaggaccaatattatccggattgtcatatcgcataatcagcaccccctctatcgctcagattggtgtggcatgcatgtaatgttttttttttaaattgcggtgaggcgcatgtggaaggtctataaaagggcggccttagctgtctcttccctctttcctctttacccatcctcgactcacaagcatctgcccaactctcatcaatcatgagaatgccgatgtggtgttgccgaggacctcgaccgcccgacaacaaccgtgatcagaaccagcggcaaccaatcggatctgctaacaaaactgctattatgctgccacatttgttgagcttggttggtatgtactgattgcatcttgtcatttctgtcatctcgctgacatgcagttttagtctccaagcctttgttactgaaaatcctctggcttgtgacgctgcccagtcgattcgctcctggatgcaagagtctggcttcaatgccattcaagagttccagatcaaggcctagtagggaccgcgtgtggtggtgggcaattatccggttagaaccaaccgttacgtattgcgtgtataattgcctagtagtagttagttagcatttccgaaccggttgtcgccggtttattccctggtgtagtagctagtgccagtttctgtcacctctacactacgtgaggcctagtttgaacagtttcgtctgcaatacagagatagcatgcccaaagatgtgtatgtattatgtagggacagtcctgtgcatgcaattcacaagctgcccaccatgtgtaataaataaataatatgcggaagggacaaggtttagcgtcgtccttctttcgggctattacttccactgatacgcggtgtgaggaagccaagggcttcatccagagaaacatgatcgcttatccatctgcatcagagaagaa

SEQ ID NO: 4475 - DNA, 752 bp, Spizellomyces punctatus
  source 1..752: mol_type = other DNA
gatggtgaacggtggtgatgaggctcgtaggaggtttgcccgtattgagtatatgctggtgaagatgtgacagaggttgcaggaaggggacggaggatgatagcaggggcatgcaacaaaatggtgagaagttgggattcaatgagtgcaaacggctgatccgatcgtgcacgttcattagattggtagctctggcgattatgccttgacgtcaatgcagcggtcacctccaatcccgcaaagagcatggtggcctctttcttatgcaagatactgaaattctccacaaacggtcgtagttcatccggaattcgcatcgatatttgtccgtccttttcagctttcgcgggaggtgtccgcgagcgagtccgaatactttgcccaccacggcctctgtgggcttgctcaagcacgcctgaaatccgtccccaagcttcatcgatggtcttgccgtcatgctgtgcgggcgactgtgcggctgcttttctcgtaagaagctcaattaggtccaactgggaaggtacaggaaatgtgtcaaagagcgccagaatgtcgggaaccgaaggggagtgatccggccccttcatgttgaatatgaatcaaaaaaggaaacgtcctttcggacaaaagtgattgaaaggtaacttggaagaggttgtgttatatgtgttgttttgtttcagttataagaatgaatgaggtcctgagctgaggagcgtagtcttgcgctgccgcacttcaagcaagtgttc

SEQ ID NO: 4476 - DNA, 883 bp, Spizellomyces punctatus
  source 1..883: mol_type = other DNA
gggatcccaacatctccttttacctaataagataatccatgtctgcaacatcaccgacactaccatcgcaccaccattcaacaccaatgaccacggaagtccgtcattgtacgccgtctttcaaagggcttgtggccctgattttgggtagtcaagtgttattgcaaaaaaagaacgaggaaagggctttgaagtatttcaaattggcggacgaggagaactgccttatgggtaaaacagccgtggcattcttcagtgaattcagaatgggtgaaggacctcaacccgtttcgacgatcccaaaggaaaactacacgcttgctgagaggtgagtgttggggtagctgtggtgaatttttctcgcccagtcaataactcatcgccgcatgcttcaggctttatactatggctgcttctcgaggatgtggtttggcaaaggctcgactggcatttctaaagacccacggcagacctggaatcaagatcaaccatgcagaagcagaacgatggaggaaggaatgcgccgaacaagggaaagatgccattcgctggttggaagaagcagcagaagcaggaatagctgcagcgcagttttgtctggcattatgctactataacggcatcgctgtcccagaagatgatgcagttgcttttctgtggtgtgaaaaggcagccaatcagggccattcaggagcacaaaacgttttgggaaatctatatatcgaaggatctggctgtacacggaatcctactcttggactgcgatggtacatcaaagccgcggaacaacgagaggcagctgcgatttacaacattggaacactattcgaacgcggaatagcagtcgaagaagatttgtcgcaagcgctgggctggtaccaac

SEQ ID NO: 4477 - DNA, 1598 bp, Spizellomyces punctatus
  source 1..1598: mol_type = other DNA
gttccgctatcaccgtttgtctgcttcagggaagcggtggaacgctctgcaatgaagagaaggcagacgcaactagcaccgggatttgacaccgcaaccaaaatcaccgacagcctgtgtatttctcgttcgtcctcgtggtcgtatgccgtcactaccagcagacaggcgccgaaggggtggtgcacttggtgtgacccatttggcagtgcgtcgtcgctgtgtgcagagtttgttgctatggtcggttgctatgagagggcacgtcctttgcctcgtgtcgctcctacagcttgtgcaggcagataaagatcgagcatcacgtgagtcatgtgatgttcaaaggatgtgaggcgccgaattgaatggatggaccaccacatgactcacgtgatgctctatctttatctgcacatgctgtacatagtgtggaggcgattgaaaatggcactaggacccattattatccggattaatccggttaatcatatcgcataatcagcaccccccgctcaaaaacggtgtggcatgcatgtaatgttttttttaaaactgcggtgaggcgcatgccaaaggtctataaaaagggggcctttgctctctcttccctctttcctctttacccatcctcgactctcaaatcatctgcattctcatgattggaccgagtcgcgatgagagttctgcagatggtggtgccgaggacctcgcccacccgattacaaccaactggaaccagcgcagcctcggaaccaacaaagctgttatgctgccacattagttgagcttggttggtatgtatcgatggcatttcttgcatttcttgtcatcgggtcatcttctgacatgcagtttttgtagtctccaagccttgtcactgaacatcctctggcttgtgacgctgcccagtcgatttgctcctggatgcaagagtctggcttcaatgccatcaagagttccagatcaaggcctagtagggaccgcgtgtggtggtgggcaattatccggttagaaccaaccgttacgtattgcgtgtatacggcctggtagtagttagcttttctgaaccggttgtcgccggtttattccctggtgtagtagctagtgccagtttctgtcacctctacactacagtacaactggggtcttgctgtctcacagcacgctgcttgatttcaaaccgaatgcgagcagcgctgcgatacacacgagatactccatgattctcattttaagctaacatggatatgcttatatgcacccaacaataaataatacatacgtcttactcgtggtgtatttatcgtttgaacctgctgatatcagtgcgtgagtcatgagtcctgatcgcttagtaatcacgatcaaatgcaatcagttgagttgaatgcggcatgtgcggcttaggacactgaccagagctatttttagggacagccgttgatcttccaatctgcattttgcggcccgttgttcttactccggtttcgtcgtctgaaacggcgacgcttgcaagtgcgcacgcggaacactttccacttctcttgtatccaggcgggagaaatatagcgacgttgaggagctatatacggggcgag

SEQ ID NO: 4478 - protein, 118 aa, Spizellomyces punctatus
MSAETLHTVRVKHGKDIQEFCHHSTALIHPVVSKTLQIPPTKLTLIHAGRKLSPTSTFADFPVCTTLLALGPRDENPDGCHPRDIEVLMAQLGVDRNTAIKALRNNGFDLVDAILHLG

SEQ ID NO: 4479 - protein, 135 aa, Spizellomyces punctatus
MSAETLHTVRVKHGKDIQEFCHHSTALIHPVVSKTLQIPPTKLTLSKLFQAQISSTPAHMRKVHAGRKLSPTSTFADFPVCTTLLALGPRDENPDGCHPRDIEVLMAQLGVDRNTAIKALRNNGFDLVDAILHLG

SEQ ID NO: 4480 - DNA, 1011 bp, Spizellomyces punctatus
  source 1..1011: mol_type = other DNA
aacttcaatgaacattttacataaccagcgaatgcaaggcaaaaaatacctctaatgccttccgctgtctcacgcacccattgaaaacttcctccagaaacgttcgctcagcgtcatctgtgacctgatgctctttacagtaatcatccaaaatctcttcctcagttctcacaactgggtttttaaagtccaatccaatcccgtcgtcatcagtttgcacatcggttttggtcgatcctacatcatgtattccagctagaccagtcccgaaggattttcgagcaaagtcgtggtgaagtgataaaagggcgcggcagtgttggataaggggtttgtagtttggcatggcttattgatgaattatctgttggatcagttccgtggtgtaattccagcatgccgtcgaaagtcggagcttgttacgtcagcccccatcagagcctcgtgagttaaccaaggagcgtgtgttcatccaccgcgtaaccatgtccgccgaaaccttgcatactgtacgtgtcaagcacggcaaggatattcaagaggtacaggctgcgccagtcgttctcttgaggattcatacgatgatccctgcttaactgaaccttcagttctgccaccactcaacagccctcatccacccagtagtatcaaaaacgctccaaatcccaccaacaaaactgactctgagtaagctcttccaagctcaaatctcaagcactccggctcatatgagaaaagtccacgcaggacgtaaactatctccaacaagcacattcgcagatttcccagtctgtacgacgctcctagcccttggaccaagggatgaaaatccagatgggtgtcatccaagggatattgaggttttgatgggtattgtttcaactaatgcattgtcaatataccgtcatgaaaattgtggtctgactgtatatgtatagcacaactgggtgtagatcggaatacagccatcaaggccttgaggaataacgggtttgatcttgtggatgcgat

SEQ ID NO: 4481 - DNA, 612 bp, Spizellomyces punctatus
  source 1..612: mol_type = other DNA
ttcaaagtaagaaatatacatgagaaagaaggaagcagtacttcttagtcatgtatatttcgtgtttgagagatgtcccaacataatacaacaccgcaaagcacatgggcaaaccgagcgatgcctaaattgctggaagactttgtgttgcaaacctatattttgaacaaaagcagtagtgcgaaacaaaagcgctgctctgtgtaccttgtttgcttcaaattgatgcaaaggaaacaacaacaatgtcgcatcaacaatagacaaggcgagaatatctgcatcccatgaatcaatgcaaaatgaacgaccatcgtcatactacaccgtttcccctccgttcaacagtgtgcctatatcgttggccgtactccatttgcaggtaaatcaagacccagcggagagggaagcactactgagcatagtaaacctgcttcatacaagatgtacccaagtctgtctcgtcttgattatgttgtgtagattggaggagagggactttagtacgtcgacaaacgaaatggccctccaggatccggagagggtcaaacacacaaaaatgctggagagacagatcgaaggggggcttttgaagcaatgaaaccatcccat

SEQ ID NO: 4482 - DNA, 1444 bp, Spizellomyces punctatus
  source 1..1444: mol_type = other DNA
attgcatctgggataattcgatgtaacttccccatgccaaagcttgtgcccaacaatatacattgtgttcatgatgaacgtaaagatggcagatccagttgcccccaatttgctatttcgcaggttgccattcctacatgtcatctacattgttcaatatctctaccccttaaattagtgtcgcccggttagctcaatcggtagagcgtgaggctcttaacctcaaggttgcgggttcgacccccgcatcgggctttcctccctagtaacggaattttttagccgaaccttttactgtatgcgttttcgtatgatcccaattctcagcccattcacactgatcgcacatatcgttgtttccgcataaaaagagtgatctgaaaaatgcccattgcgggagttacggtcccgaatctcaacacgttttggcatagattgtacaaatttaggtataacaaccgtgaggcacatagtgtggaggtgattgaaaatgtcactaggaccaatattatgcggattaatccggttaatcatatcgcataatcagcacccccatctaacgctcaaagcggcgtggcatgtattgtaatgtttttttttttaaactgcggtgaggcgcatgccaaaggtctataaaagggagcctttgccctctttgaccgcccgacagcaaccgtgatcagaaccagcggcaaccaatcggatccgataacaaaacctactattatgctgccacattagttgagcttgcttggtatgtaccgatggcatcatttcttatcatctggtcatcttctgacatgcagttttttagtctccaagccttgtcactgaaaatcccccagcttgcgagtctccccaatattgcgaagactctggcttcaatgccatcaagagttctggatcaaggcctagtagggaccgcgtgtggtggtgggcaattatccggttagaacaaccgttacgtattgcgtgtataattgcctagtagtagcttagttagttagcttttccgaaccggttgtcgccggtttattccctggtgtagtagctagtgccagtttcggtcacctaatacactactattgaaaacaatcccgcaatgtcttcacctagacactcaactggctactctttgttgtatctcgacctatagccgcgcattttacagactaagacatgcttcctgatgctggtgttgcagtcactttgacggtggtacaacccgctatcgagttacctgatgtcctaacctaagctcatttccgtaccccatccttggtttatactgtcaagaggaatgtgccaggcattcaaagcgccactcgcactaaagacatcgaggggcgcagaacagcactggctgaacatgtccatattgcaaggattttgaacgactagagtacaagaaaggattcaagccgctatctgacctcgcaaaacg

SEQ ID NO: 4483 - protein, 162 aa, Spizellomyces punctatus
MPSRLLPGQKLFFPNVVFRLLRSNLPPHQCVFRCPPQLNKIDITSYLQNLYNITVTDVRTMNYLGRTYKTRYGGRETTANYKKVIVSMEEDFNFPPPPPTKLGASVEGDAAIKLPPRGSFGRNSANKYRHKIEEGRPKGVGGHVRKAMEVAKAAKEATKEVA

SEQ ID NO: 4484 - DNA, 874 bp, Spizellomyces punctatus
  source 1..874: mol_type = other DNA
gtgctgctttttcctttgcacatatacatacgccatatcaggcccatgcctgctccaacaatagcaccagatgtgatacttgatattagttcatctttatcccgcatcctgaagctatctactccctctgccgcgtttttctgatatcggtaatgaagcacagcttctctaatacctgttacattgcggataagttagcaatccactatacttgtggcattagagaagagtccagaaaggtcaacataccaaaaaacggcgcgaacgcgaggacccaatttgttcccatgctgaaagcccatgctagccgactttgacctcgtacggcggcgaatatggcgcccagcgtagaacctgtcagccctgcaaccgcggtgctttgcagtacaaacatggtagagttccgttcgggtgcatacggtgatgtggaatgcacctgggtatccatgttcgccaaggtcccgcaatgacatacaaagaatgtcttacgcaacgatacagaaaaaaggtgtagaacctagcgcagctgtctggcagcaaatgatcgacgaaggcaaatgggctacgagatcactctcaagcctcaattgcactgcttgcagatcgcgtagccatagcaactagctggaggggaaagcgtcgaggaggacttttagcactcgatccgtcctttgtttgaccgaaatccctcaacatgccttcacgcctactacgtaagtgagaatgggtcttactgctatttatacagctgctgattctgcttttccgtttgacacatttagcggggcaaaagctcttttttcccaacgttgttttccgactcctccgctccaacctcccaccccaccaatgcgttttccgctgcccaccccag

SEQ ID NO: 4485 - DNA, 390 bp, Spizellomyces punctatus
  source 1..390: mol_type = other DNA
ggttgatgaactgccgacgctatattcatgcagtttggtgagccggtactggaaccctgttgcacaagaagtgttatggcgtgaggtcctccttgacaatgccccaagactacgacgatttgttcgtggcgtagccttcagtgctacaccgcgggtggctcgccgctcagcgaggactcgtgcgggactggtgccaaaaaatttcggtgaagtcccaaaggcatttgaagaactgggcgagttgatcaaacctgggttgatgaatattgccaatggggcgagtaggcgatttggggttggatcaaagcctactacattgacaccatcggaaggagagacacaccctgcaatgctcaaagtcatcgcggaacgaccgcctctggtcataaa

SEQ ID NO: 4486 - DNA, 2210 bp, Spizellomyces punctatus
  source 1..2210: mol_type = other DNA
ctaaacaaaatagatataacatcatacctgcaaaacctgtataatattacagttaccgacgttcgaacaatgaactacttgggccggacgtacaaaactcgttacgggggccgggaaacaacagcaaactataaaaaggttatagtttccatggaagaggatttcaatttcccaccacctccaccaacaaagcttggcgcttctgtggagggtgatgcggcaatcaagttgccaccacgaggctcatttggaaggaactctgcaaacaagtatcgacacaagatcgaggagggccgaccaaagggcgtcggaggccatgtgagaaaggcgatggaggttgcaaaggcggcaaaggaggcgacgaaggaggtagcataggtacaggctggcatttagacgcattgtttacagtaacattgtttatttcgcaaactctacatggattgcgcccaaatccgacaggcttggcagatcttgatgttctgggtatattcgtgtggaggtcgagccaacaacatgatgtcagagggctttgagtctacatgcatagtgcattgcacattgtcacattgcttaaccgtttgtgatagtgagaggagtagtgtagaggtgacagaaactggcactagctactacaccagggaataaaccagcgtaaactggctcgtaaaagctaactaactactactaggcaattatacatgcaatacgtaacggttctaaaccagataattgcccaccaccacatgtggtccctactaggccttgatccagaactcttgatggcattgaagccagagtctttgcaacattggggagacttgcaagctggaggatgttcagtgacaaggcttggagactagagaaaaaaactgcatgtcagaagatgacccgatgacaagaaatgcaagaaatgccattgatacataccaaccaagctcaactaatgtggcagtataatagtaggttttgttatcagatccgattggttgccgctggttctgatcacggttgctctcgggtggttcgaggtcctcagcaccaccacatcagcgttctcatgattgatgacaagcggggtatgcccatgcctcaaatacttgatagttgattgcgctatgaatcaagaatgcaacaacaagctgacaaactcataatcgtcagatacgagacagcatcagtggaaaagacaaggatgaacagtacgagcgacaaggttcagacccgagacaaggcggaatttctgcaaataaaagggtaattgccaaaggcccctccttcactttcttgctatcgcactgctggctgcccttctactcgacttgcttgaaagaaaccgacaagttccatctggtcaaaaaagggttttagaaaatcccccattttaaatggctgctcacgcgtcccaaaagacccgaattaaaaggccacttgtgctaggccggcagctgtttccatttctcgctttccactttcaaaagatcttacaaaaaaacaataaactattaggataactagagtagctctcagccggcattggacatttactcctacggtagtctcagtgtgtattcccaacgcttaacggtctctgcagccgcaaggttgttgccgcttcattgaacaccctattcccgggacctcgattgtgaccgcaaatgcccgataaacaaataacggcattcatagcagacattctacgctttggtctagagcgactttcgctagtgcctgcagacaagaggtcctttgaggttcaggatgccattgccgcacaggtaggtacagttacgccacccttcgctgctccattgtcagaggtcatgagttgcggggacattctaccaatcttatctcaccacaattgtctcttgataatgttggtctgtcacttaggaactagcggtggatgttctctccagcattggtgccgttgattccacgccaccctcgacatcggtgattgaagaaattgaaacggtcccagctgtcgaggacggaatcaccgccgatcagaatgttcctactgaaagaccatcaatagaggaatcagacatatcggaaaaccagcattggaatcgagctgtagtcctggcaaggtctattggaatgggtggctcgccgcggaaagaaaacaagcccgataagcagaatctgaatgcaatcgcttcgcatctaccccatgagcttctcttgcatatatttgaatg

SEQ ID NO: 4487 - DNA, 874 bp, Spizellomyces punctatus
  source 1..874: mol_type = other DNA
ggagtggaatgatggttgcgattgtcgccactctgggctcgttgttgctttgatcgtgtgatacatggtgtggaaaggtgtgattttgtagattgctgtgctgcaggtgggctcttatgatgagctgcacatttcaatatcttcttaaatacttggtcttgccgccgtgtatcaatacagattcctgtaaaatatcattgcacactgttcatatggacactatttggatccagaatgcatcacataaagcccttgggccacgattcaaaaagcacggcaatcatcaaaaataattcatcatcttgcagacagctccgcttgttgaaccatgaatcatcgttgccataacaacaagcttgcgcacgtcctgcccagtagcgaattccgctcaatcttacaaattctgcagccttatgccccacacttgcgcccctggcacttcatcatcttcatcacgcactccatcacacacaccatcaacacacatctcttcaaacatggtcaaggcagtcagtgttgtacgtggtgactctcctgtcacgggcacggtcacctttacccaagagtcagacagtgcacctaccattatcgagattgacttgaaggacttgacacccggaaagcacgggttccatgttcagtaagtatcttgggaagttggggatagtgaatagtttcttggagatggtggattcacgggtcatggcgcgttaatcatgatgggattatttggttcgattgctgcacatagcgtttaccagtaacttacaatgtttcgaatgggtttctgtagcgaattcggtgacaacaccaacggatgcacctccgccggtggtaagttctaccttggactcggttcacatggttcacgcaa

SEQ ID NO: 4488 - protein, 153 aa, Spizellomyces punctatus
MVKAVSVVRGDSPVTGTVTFTQESDSAPTIIEIDLKDLTPGKHGFHVHEFGDNTNGCTSAGGHFNPLNQTHGAPTDSVRHVGDLGNLVAGPDGTVKTKIEDQHIKLIGPLSIIGRTIVVHAGEDDLGRTDHKESKITGNAGGRVACGVIGVAK

SEQ ID NO: 4489 - DNA, 836 bp, Spizellomyces punctatus
  source 1..836: mol_type = other DNA
ccagtattttattcccagtgggcaagagcgggagcgcggttagacagtggctttgactatgtacccgtcaacccttttgacgatatgttcggttccagtgccgagagcagttctgaggaggacgaggacgaggaagaagaagaggagagggtcggcgtttcggaggttgggcagacgactatgagggaggaggaggaaggacaggctgatgatgaggatactgatgaagaacttgacgacgagtcagagacggatgaagacgaagaaactgaagacgatgaagaagatgatgacgacgacgacgataatgacattgaagaaggcaacgatcaagcgaacaatttttcctaccaatataatttattctgtgcgagctgcgaagaccaatttctgatctccttgcgacaacccttctctggacagttgcagtgtgtattctgtggtcggcctgctaccaccttgcctgccaccgacgacgaagaaagtccaaacttgaatacacctaccgattcagatgtgcgtcgacagcaaaatgaacaagtggaggttacacctaatataccacgccaaacgcgagaagatgactttattgctttgacggatccttcgtcggaatcaaatccttcaagatcttcttcgcctataccgtctgctccaccacctccaccaccacccccaccactgagacaagaaacacagacttcaccccgaacgacatcgtaccacccgacaccaccagcccaaagaattctcaacgcttatctggaagagtttggtccaaaccttcctgaccttgatcggcttgttgcattatgtccatccttagttgtcgatgg

SEQ ID NO: 4490 - DNA, 1681 bp, Spizellomyces punctatus
  source 1..1681: mol_type = other DNA
atcctaagttgatgttgtgaacaggtcacttcaaccctctcaaccaaactcacggtgcccccactgactctgttcgccacgttggtgacctcggaaacttggttgccggccctgacggtaccgtcaagaccaagatcgaggaccaacacatcaagttgatcggtcccttgagcatcattggtcgtacgattgtggttcacgctggtgaggacgaccttggccggactgaccacaaggagtcaaagattactggaaacgctggtggtaagtctgaaaaaggacattggattcgctaaaaaggatgaccagatactgatgtgttattggtaggccgtgtggcatgtggtgttattggtgttgcgaaatagaggattataattcatagttgtaactgtgtcggcggtcactttttttttggccataaagactttacattgcagaaatatcatatacgaatacagaaatgccgtggcctgaaggtcttgataccagatggtaaatctatttactattagatagtgtggcggtgacagaaactggcactagctactacaccaaggaataaaccggcgacaaccggttcggaaaagctaagctactactaggcaattatacacgcaatacgtaacggttggttttaaccggataattgcccaccaccacacacggtccctactaggccttgatctggaactcttgatggcattgaagccagactcttgcatccaggagcgaatcgactgggcagcgtcacaagccagaggatgttcagtaacaaaggcttggagactaaaaactgcatgtcagaagatgacccgatgacaagaaatgcaagaaatgccatcgatacataccaaccaagctcaactaatgtggcagcataatagtaggttttgttatcggatccgattggttgccactggttctgatcacggttgctgtcgggagggcgaggtcctcgacaccaccacatcggcgttctcatggttgaccaagtcgcgatgaggttgtgtggggcgctatgaggctgcaatgtgggtcgcaatgagcgttgtgcagatgctttgagagtcgagggataaagaaacaagagggaagaagacgaggggggggggtttatatagaaaaaagaggggatacattgagtcatggagcgtcatgcatgtggcaactgaagcagatggccgcaagggatagtaactgcagtcattcatggctgcatattggacccgttttctcatgatggagcatctcttgtgcatagttcatttgcctaaatcgaggcatcttacatttcatttcattcgatccagtggctgcatcatctgcagactgacagtcttttttgcccacacactatgtgcttacccaatcttaataagaccaaatacatccttgtgtaacaatcatccagcaagcttccttccactgcaaccctcattgctctggaacttcgcaagacgcacccggcgcaaacagcacgttttgaccaccagcttcacacacaatggtcgttcccatgcctgaatctgaacgagggacataccacacgtctcccctcgacttttcacgcgaagcttacagaactcggcatgcaccaagcgccataatttttggcgatgggtccactcggtggtcgcatgatgttactgttcctgagcctttggatgaggaacctgag

SEQ ID NO: 4491 - protein, 1096 aa, Spizellomyces punctatus
MTGHVVSCTASDFGIWSPEQKSVVKHKVTSRICAVSWTADGQYFALGLFNGHVSIRNKSGDEKVRIERGDSPVWSLAWSPSSDGEYDVLAVADWSQRLSFFQLNGRQIGKDRQLGFDPCSVSFFGTGEYIAIGGSDRKVTLWTGEGIRLGQICERENWVWCCKVKPRQNYIAVGCQDGTVAVYQIVFNTVHGLYHDRYAYRENMTDVVIQHLSTNQRARIKCRDYVKKIAVHKDKLAVQLPEKVIIYELFNDDSSDMHYRIKEKIQKKLECNLLVVTHQHIILCLEKKLQSFNFVGEKEREWNLEALIRYIKVIGGPKGREGLLVGLKNGQVLQIFINNPFPIPLIKLQASVRCLDLSLRRRKLAIVDEHNTCLTYDIKTRQLLYQEPNANSVAWNTELEDILCYSGNGMLNIKASNFPAHHQRMQGFVVGFKGSQVFCLHIYAMTSVDVPQSASLERYLEKKDFDSAYQVACLGVTETDWRRLAIDALEALRLDIAEKSFARIRDMHYIDLVRNISRMQAEGKNDQDSFLADIHAYAGRYQEAAKLHIKAGNQQKAIDMFTELNMWEYATKIAQETHTNTDNILKRKAQMQQDRNDLLAAANTYLEVGDYMKAIDILGPNGWLDNLIEVARKVSNSDTKALSRCVYFFRKHNHHAYAAETLVKMGDIAHLLNLHIELQHWEDAFKLAETHPEFTEQIYLPYANWLATNGHYVEAQENYRKAGRIDEALRVLEQLTENAVTERRYDDAAYYYWTMSSEQLDKLPVDITADQLTPEQQRVLKRFQETYQLAEIYHAYFYVSRYIDEPFTAHVPEALFNMARFVWNYLNHQQPPPGISKVYTLFALAKLARALGAYKLARYAYDKLQTMNVPPIWQETVDVGTLTIRSQPGLDKETLQPICYQCSAINPLLNPKGDSCTNCLEPFVHSFYSFISLPLVQFTVESGISDDEASRLINMDPPSLDGKRDGSSIKHDRPRASSATKDGQSSAGKGGMVGASGSVKDDPFRRQLAGLERGGGTGYTPVKVGRKALMTMERHAVFIRRWGKKCLRPEYYRMMLTDVPVVLCKTCQHFFLEDEWVYQILSKGCCSFCRAKVDLE

SEQ ID NO: 4492 - DNA, 619 bp, Spizellomyces punctatus
  source 1..619: mol_type = other DNA
ttacgataaactacaaacgatgaatgttccgccgatatggcaggaaactgtggatgttggaactcttacgattcgaagtcaaccaggtcttgacaaagaaacacttcagccgatttgctatcaatgctctgcgatcaatcctttactgaatcctaagggcgacagctgtacgaactgcttggaacccttcgtgcactccttttactcatttatcagcctacccctggtccaattcactgttgaatctggtatcagtgacgacgaagcatctcgactcataaatatggatcccccaagcttggatggaaagagggacggaagttcgatcaagcacgatcgtccacgagcatcgagtgcaacaaaggatgggcagtcaagtgcagggaaaggaggaatggtgggagcaagcggatcggtaaaagacgatccgtttagacggcaattggccggtcttgagcgaggaggaggaacaggatacacaccagtcaaagtaggccgaaaagctttaatgacaatggagcgtcacgccgtattcattcgacgatggggaaagaaatgtttgcgaccagaatactatcgaatgatgctaacggatgtacctgtggtgttgtgcaaaact

SEQ ID NO: 4493 - DNA, 511 bp, Spizellomyces punctatus
  source 1..511: mol_type = other DNA
atcgagggtgttcgcttcttgtacaattgtgtgactggtcagactgctcccgacgcttacggttgcatcatggcggatgaaatggtaatcgacctctatatgcgcaacttgctgctagaatattatagcgtggttaacaccattcttgtgttagggactcggcaaaaccttgcaatgtaggttcggttggttgacgatgcacatatccactcttataactaaaaggattacaggtataacgttgttgtggacattattgaagcagtcccctgagccaggaaaaccaacaattgagaaggtttgcaaaatttgaaccccgctaggctgtgatgaggatactcattcaaactggttttacggaaggcggttattgcatgtccgtcaagtttggtcaagaactgggcgaatgagttgaaaaaatggctgggtccggacagaatacgaccctacgcatgcgataataaagggacgaaagagcagacggagaaggacatgcgaaaatttgtttctg

SEQ ID NO: 4494 - DNA, 1605 bp, Spizellomyces punctatus
  source 1..1605: mol_type = other DNA
tgtcaacatttctttctggaggatgagtgggtctatcagattctttcgaagggatgctgttccttctgtagagcaaaagttgatcttgaataatgtgtatatatgtgccactctgaattttgaactacactttataattgagctcgaggcctttagttggatttacgaggtcatggactgggaataacttcagcgtgcatcacaattgacagtagcatgacactaaggacttttacaaagtatcaaagtacatacttcttactgttcatgatcaacacaaatacagaaaagcccgggcgttattgaggttgaagtctgaacatagcagctatcggacgtcgcttacataatgtggaggtgattgaaaatggcactaggacccattattatccggattaatccggttaatcatatcgcataatcagaaccctcatcgcgacttggtcaatcatgagaacgccgatgtggtggtgccgaggacctcgaccgcccgacagcaaccgtgatcagaaccagcggcaaccaatcagatctgataacaaaacctactattatgctgccacattagttgagcttggttggtatgtatcgatggcatttcttgcatttcttgtcatcgggtcatcttctgacatgcagtttttgtagtctccaagccttgtcactgaacatcctctggcttgtgacgctgcccagtcgattcgctcctggatgcaagagtctggcttcaatgccatcaagagttccagatcaaggcctagtagggcccgtgtgtggtggtgggcaattatccggttagaaccaaccgttacgtattgcgtgtataattgcctggtagtagcttagcgtttccgaaccggttgtcgccggtttattccctggtgtagtagctagtgccagtttctgtcacctgtacactaaattattaatagaaaacacagccaccagccccactatctcgcgccagccgatgtgtttgacctcgaccaccgatggggaagcgaagaaatcacagtgatgaatccggtggcgacgactcggaatggggtgatgaaaattacggctcgcctcctaagcgtcggaaggatagtgattcagaagaggaccttcgcacgaagaaagttaccgctggagtcaagaaagctgtgaccactaaacaggatggcgttcgcaaaccattagcgttgagaggaaactctcaagacagtccgagccatggattgaaacctttcacaccaaaccggactgttttgacacgtcccttcaaggtatacctttctgtgaacggcatggacgagttgatttcgcaactaacaaccatcttctgacccgaaggtgcctgcatttgtcggtggacgtccaccgggcggtggtggtataaggcttggcaccactctaggcactcgggctcgtatatccgtttacaaaggaccgctgcacgatcccgaagccgaaaatgctattgtcttgcaccatccaaaggtgttgtccgccacggagcagctggagcagttaaagtcgactgctgggggattgaagcaagcgaaggccgaggtacatgtagtggttgatcccatgcttgggaacatccttcgaccacatcag

SEQ ID NO: 4495 - protein, 347 aa, Spizellomyces punctatus
MDIQSMLYTERTRMGFARQSASIISFATLALLITYITTIHAQPAAPPPQSPPSIKEDWLDTDNMFFALVDEPESPDGESALYPPNDCYANWCFPSGMFVDLVIKHCNQTITKIDSKSLPTSAKEVEQLLGDCICGASDDKGLQQDINAMWQTCANCLNGKMGVTDPKHHSTINATTFNKACSCKDPGPVQALVNMQNPNWVCNDYDEDRLRNGRRSGRALPVFRPPTSATPNNASVSAPSSAVPVSVPASAAPSAAPSAAPSAAPSAVSAPPAAPAPPAASPTNAPAPPAPANLRISGAAFMPQAAGDRFPSPPPPPPPPEDIEDDWRWWMRPGGQREERSLGGLRP

SEQ ID NO: 4496 - DNA, 814 bp, Spizellomyces punctatus
  source 1..814: mol_type = other DNA
cggaacgaacaaggatgggattcgcacgacaatccgccagcatcatctcgtttgccacgcttgccctccttatcacgtacattacaaccatccatgcccaacccgccgcacccccaccacaatcccccccttccatcaaagaagactggttagatactgacaacatgttctttgccctcgtcgacgaaccagagagtccagacggagaaagcgccctctaccctccgaacgactgctacgccaattggtgcttcccttctggaatgtttgtcgacctcgtcatcaaacactgtaaccaaacaatcacgaagatcgattcaaagtccctcccgacatctgcaaaagaagttgaacagctactgggagattgcatttgcggtgcaagcgatgataaagggcttcaacaggatatcaacgccatgtggcaaacatgcgcaaactgcttgaacggaaaaatgggcgtcaccgatccgaagcatcatagtaccatcaatgcaacaacattcaataaagcttgttcgtgtaaagaccctggacccgttcaagcacttgtcaacatgcagaatccaaattgggtgtgtaatgattacgatgaggatcggttacgcaatggacgacgatctggaagggctctaccggtttttagaccgcctacctcggctacacccaacaatgcgtcagtgtcggcgcctagttctgctgtaccggtttcggtgcctgcatctgcagcaccatcggcggcaccatcggcagcaccatcggcagccccgtccgcagtatccgcaccgcctgcagcgcctgcaccgcccgcagc

SEQ ID NO: 4497 - protein, 433 aa, Spizellomyces punctatus
MASLLFDDITFPTELYDPTTYTFSDPIKDYLLFAPQVITLYERKNTPTSNMSQKTGTEGPSVAETALKTSVQVFGEFVKYQLRSSEFDTFTARKAERDWEGSKESVRERERRQEEERERERERERERERERERERERKQTRERERESEMAKERDHDHEHETNRTRPQHHTKHPENNPEKQKHHASSLDTPPKTPPTSHSTAPESPTTTTTTTSLITTTTLTLLSLTTAYAASKTHSKATFLNSFRSLHKDLTNHLTKIRTWIKTRQDLSLPIPTFLLHDVEKIQSLHDLVSKLDQGGHDWALMPAYVGASVSAAVGAAAYGGILAAQVGRVGILGVLVAAMYGAVVKGRLASGVVRSSLGVVADKARRVCMALEEGEKERAELVRGAFGRDMVNLDEVPLEDEREEQWQRPIGRKTKIHSTPTRGHENEFIAV

SEQ ID NO: 4498 - DNA, 441 bp, Spizellomyces punctatus
  source 1..441: mol_type = other DNA
aaacctccgtacaggtttttggagagtttgttaagtaccagttgaggtcttctgagtttgatacttttaccgcgagaaaggcggagcgggattgggagggtagtaaggagagtgtacgagagcgggaacgaaggcaagaagaggagcgggaacgggaacgggaacgagaacgagaacgagaacgagaacgagaacgagagagggaacgaaaacagacacgagagagggaaagagagagtgagatggcaaaagagcgcgaccacgaccatgaacacgaaacaaacagaacccgcccccaacaccataccaaacacccagaaaataatccagagaaacaaaaacaccatgcctcttcactcgacactccacccaaaaccccacccacatcccattccaccgcacccgaatcaccaacaacaacaacaacaacaacttccctaa

SEQ ID NO: 4499 - DNA, 1439 bp, Spizellomyces punctatus
  source 1..1439: mol_type = other DNA
gagtcccacaaacgccccggcaccacccgcccctgctaatctgagaatatcaggagcagctttcatgccacaagctgcaggtgaccgatttccatcaccaccacctccacctccaccacctgaagatatcgaagacgactggcggtggtggatgcgtcccggaggacaaagagaagaacggagtctgggcggattgagaccatagtcacaagacatttgcgatggatagaaaatattggactattatatgacgcattttttgttttgtaatttttaccattcaatagtcttctttatagtgtgcaggtggtagaaaatgtcactagggacaaattctccctccaacccactacagccggttctaatttacaattagccagcctgtccaacccttcataacctatcctgcaaacaagtcccacccctatcctaactcgctacaggttccagcctgggttgaactggggtacgtgaaaagctaactactactaggcccaatgacacacgcaatacgtaacggttggttctaaccgggtaactaagcccaccaccacgagagaaatcctactaagcccttgattccgaaattctttagtcggaggatgttcagatactaattaaaccagaattagactggataatccgcgtgggaaaatacaaagataatgcatacctgcgatcgtagcaatatagtagtagcagcgtttgcaaggggttatgttgttgttgtagtcgggaggcgaggtcctcgacaccaccacatctgcattctcatgattcgaccgacagtcgcgatgagaagagttgcacagatgctttgagagtcgaggaactggtgaggaaggggagagagagcaaaggcccaccttttatagaccttcggcatgcgcctcaccgcagtttaaaaaaaaaacattacatgcatgccacaccgtttttgagttagagggggtgctgattatgcgatatgattaactggattaatccggataataacgggttctagtgccattttcaatcacctccacactaaacaaacggcggacacccctgttttttacattcgaatgaaccaactcgatcattacccaaatttcgctgactcatcacaagagccttctggttgacggacttgccacgtttttgcccagcacccacgcatctatctggccattacatctctttaacaaatctctattataaatactctaccatacatttccttttgaaagccaccatggcctctctcctctttgacgacataaccttcccaaccgagctctacgacccaacaacatacaccttctccgaccccataaaagactacctcctctttgcccctcaagtcattaccctctacgaacgcaaaaacaccccaacctccaatatgtcacaaaaaacgggtacagagggacccagtgttgcggaaacggctttga

SEQ ID NO: 4500 - protein, 388 aa, Spizellomyces punctatus
MHDSRKHEEKCICAVCTCGRHKLCKVARTVEGHLDAHTEYGDNYVKYQTERRLRGKAHPQQLSIGGDFYGSTENREKFVAHAFPPQMPPKKVVYARNDAPFDSTTTQKHDFPAWPITTVSSMRPKANHIENTAKFDGQTTNRRDFRPFELQSRPFRKAADYLKPNTRFEGVTTHDADYRAWPVPPPAKSREVASYVSPTEDREFKSTTGATYVGHQLPRSSLSMAPRQAYVVSPVKFEGVTTNRDSFRRWTLPTKEPKKKAIYTPNQSVFQDSTTYHDNYQPKTVERLLRIVPKYQAVPTKFDATSTHRLDYQPPAHQTREADFRPRATYNPQHDDRDWGTTMRSQYTPKPIPRCPAVPWMPLERERHDDGHVYLTDRSRPALAGVVV

SEQ ID NO: 4501 - DNA, 855 bp, Spizellomyces punctatus
  source 1..855: mol_type = other DNA
catacgcttgacggggagcctaagcacttgaatgaggaaggaggccgatggaaaattaggaaagaaagggtataccatggacaaggaactcctgggtaactgatgacccacgtatgtggcgcctgtcgtcgacttaaattccctgtgctcgccttatataaacgtcgtgaagtagtgccaatcaaggttacaaaattacctgtcttctgttggactgacgtagctggctacctctcgagactttgctggaggaggaacaggccaagcgcgataatctgcatcgtgcgtcgttacaccttcaaatctggtattaggtttgaggtagtcagcagcctttcgaaagggcctggactgcaattcaaacgggcggaagtcccgtctgttggtggtctggccatcgaatttggctatgaaacaactaccgtcagcagaacctcaacacatcagaatgtggtgtcaatgctcaccggtgttctcaatatggtttgctttgggtctcattgatgatacagtggtgattggccaagcaggaaagtcatgcttctgagtagtggtagaatcaaacggagcgtcatttcgagcatatacgacctttttgggctggcggtacgcatgagaatggcgctgggcggagatacactttaaccaaagtacttaccggcatctgcgggggaaatgcgtgagctacaaacttttcccgactgtctccaataaagggtagtttagcacttgatgatacatttatcagatcgagtggggaacatctcatacttttcagtagaaccataaaaatcccctccaattgagagctgctggggatgggcctttccccgcaatcgtctctccgtctgatac

SEQ ID NO: 4502 - protein, 291 aa, Spizellomyces punctatus
MGSSAIFNHLHTLLELVRSMDMREMGNGSQQDSSDPFGAFDIDEADLEPLYHQDRLCCPQCRRNHKVFCPRCGIPLGHTPPHVQLPISVDIYRDPRETEGKSTSAHARIIAPDSVTIKVENMVKAPDTSSITKYTDPQRCLLLFPSEDALPLADIEPGSFDKLIVLDGTWKQGKAMAGAIAGQSFQRVSIRSRRTLFWRYQPFGETYLSTIEAVYWFFRDFHDAYSRDPYDGRYDNLLFYFKLQWGLIQDIYSRNPQKQFTSRKLDGESYIRGRARLQNSASPPDTEEAQT

SEQ ID NO: 4503 - DNA, 938 bp, Spizellomyces punctatus
  source 1..938: mol_type = other DNA
tcattgcgcctgattcagttacaattaaggtatgcctctgcatgtcgtccgtcatgtaccagaaggccaatataagtatggttgtaggtagaaaatatggtgaaagcgccggatacgtcgagcattacaaagtatacagatccgcaacgatgtcttcttctctttccctccgaggtgtgagctgcatgatttggcttctgacctgttgctgtgtttgtcatcgattccttcatatggctaggatgccctaccgctagctgacatagagccaggttctttcgacaaactgattgtgcttgatggaacgtggaaacaagggaaggcgatggctggtgcaatagctggtcagagctttcagagagtgtctatccgaagtcgccggaccctcttttggcgttaccagccttttggagagacctacctgtcgacgattgaggcagtgtactggttctttcgagactttcatgacgcatatagcagagatccttacgatggtcgctacgacaatctattattctattttaaactgcagtggggcctgattcaggacatctattctagaaatccacagaaacagttcacgtcaaggaaattggatggggaaagttacatccggggaagggcgagactgcagaatagtgcgagtcctcctgatacggaggaagcgcaaacttaatagtaaatgtactgtaatgcatgaaagaatgtaaataaatagatagcgttcgtaagggtcgtgttgtggtaagcgtggcttgtgtgtccaatgggtcggacatgcaccagggacacacttcctcacctgcaaagcacgcttactgacgatctcccccaacacaccatgttatcacatgtagagggcttaatagctgagcaagtgagtattcaagcagcaggcaaactgaaacagccatcgcctatgctgatttatctcatgc

SEQ ID NO: 4504 - DNA, 1523 bp, Spizellomyces punctatus
  source 1..1523: mol_type = other DNA
ttcacataattgtctccatattctggaaggatcttatgttttaacagagccctgccacaaaatgagacatgttcttaccggtatgagcgtcaagatgcccttccacagttcttgcaactttgcacaacttatgcctgccgcaggtgcaaacagcgcagatgcatttttcttcatgcttcctagaatcatgcattgtaggaagcgccaatctattccagtgttgacccgagtacgagaaggttgaagcaaggtcttccaggggatatatcagctattcattcatgcaacttatattcgatcggccaaaaatcaaaaaatagcatcggggaatttgacgattagctgtaggtaagcagaacgcgtgactaaacccttctttagtgtgcaggtggtagaaaatgtcactagggacaaattctccctccaacccactacagccggttctaatttacaattagccagcctgtccaacccttcataacctatcctgcaaacgagtcccaccccatcctaactcgctacagattccggcctgggttgaactggggtacgtgcaaagcagcacgattccactaactaccactaggcccaattacacatgcgatacattacggttgtttctaaccgggtaactaagcccaccaccacgagagaaatcctacaaagcctttgattccgaaattctttagtcggaggatgttcagatactaattaaaccagaattagactcggaatccgcgtgggaaaaatcagcaagatatacctgcgatcgtagcaatatagtagtagcagcgtttgcaaggggttatgttgttgttgtcgggcgggcgaggtcctcgacaccagagcagtattctcatggtggacttgagagttgagcgttgggcagatgcttgcgagtcgagaatgggtaaagaggaaagagggaaaaggccccccttttatagacctttggcatgcgcctcaccgcagtttaaaaaaaaaaacattacatgcatgcctcaccgctttgagcgatagatgggggtgctgattatgcgatatgattaaccggattatccggataataatgggttctagtgccattttcaatcacctccacactctgctggaactggttcggtcaatggacatgcgcgaaatggggaatggttcccaacaggacagttcagatccgttcggggcattcgacattgacgaagcagatttggagccactctatcatcaggaccggctatgctgtccacaatgcagacgaaatcacaaagttttttgcccccgctgcggtaataacgacaagactggcacccgcaaaagagaagggaactcacttttctatatgcctttcttactttactataggcataccattaggccatacacctccccatgtccaattgccgatatctgtggacatgtatgttcgacaagcagtgttctaaagctatgacactcattctcgtcgtgcagttaccgtgacccgcgagaaactgagggcaaaagtacgtcagcacatgcgcgca

SEQ ID NO: 4505 - protein, 565 aa, Spizellomyces punctatus
MSLPLRQLTRIRPPHGSCSLSLARSLIQTRSLATQAHNSSLDSVRPYKTRSTAELLNSLLVFQLCAMPKIVEASPTILEWAEKMKLTRPVYAVIKQTFFRHFCGGEDLAEVVPTMENFKSLKIGSILDLALEADVDAASLSGPAAQEQARKVAGMFKESIDIASKTPGSFIALKVTALVPPLILQRWSNTLVLLQAAFRKADRNGDGRLSLEEFLELSATFPHLRGDTASALFAATDRDKDGFIDWLDVTDTFSLYNSSASRSLIRPPIEPVTPDNQLISADDLDTTDLVIPDIDIVAQHARDLRVRILVDAEQTYFQPAIDDVGLNLCKKFNPPHHGPNEAGRRGPVLYNTYQLYLKDGYERLVLDVERAERNGYSFGVKIVRGAYMHAERERAEELGIPDPIQPTIEATHAAYNKAIDFLVNKISGFQSPDSNITVEGNIRPLSFVVASHNQNSVEHACQQMNQFNVPAGEGSVAFAQLMGMQDGTTFSLASKGYKVFKYIPYGPIGVTIPYLQRRALENSDVLAGGGGIVQDRKAILNELKHRLGVGRSAGGFTGPLRSKVA

SEQ ID NO: 4506 - DNA, 939 bp, Spizellomyces punctatus
  source 1..939: mol_type = other DNA
acatctagcaccagccgttcgtatccgtccttcaaatacaactggtaggtattgtacaagacaggaccgcgtcttccggcctcattaggaccatggtgcggtgggttgaatttcttgcacagattcaatccaacatcatcaatagccggctggaaatacgtttgctccgcgtctactagaattcggacgcggaggtcacgggcgtgctgtgcgacgatatcaatatcgggaatgacaaggtctgtagtatcgagatcgtcggcggatatgagttgattatcgggtgtgactggttcaatgggaggacggatgagggagcgagatgcagatgagttgtagagtgagaacgtatccgtgacatcaagccagtcgatgaagccgtccttatcgcgatccgtagcagcgaacagtgcacttgccgtgtcgcctctcagatgaggaaatgtagctgaaagctccaaaaattcttccagactcagcctaccgtctccgtttcggtcagctttccggaaagccgcttgcagtagcacaagcgtattgctccagcgctggagaatcaatgggggaacgagcgcagtgacttttagcgcaatgaagcttcctggtgtcttgctggctatgtcaatactctctttaaacatcccagcaactttacgagcttgctcttgcgcagcaggtcctgaaagcgaagccgcatccacatccgcttcaagggccaggtcaaggatgctgccaatttttaggctcttgaagttttccatggtcggaacaacctcggcaaggtcttctccacctgtcgcagaaaaacatatacgtgagtccacagttcagagaggtcaggctcatcaaatatgcataccacaaaaatgtctaaagaaagtctgcttgatgacggcataaaccggccgagtcagtttcattttttcggcccactccaaa

SEQ ID NO: 4507 - DNA, 945 bp, Spizellomyces punctatus
  source 1..945: mol_type = other DNA
ccttctagtccgttgggtgaccgcccttttgcctttttgcaaccgttggatatctgttcctcgggctaggcttggcagcatttgaagcaggagcttgaaagtttacgcatatttgttgcggaagaaagctctcaagtgcaaatcttgtactttgacattgcaccggcggtttggctgtaagtattcttacttccctttggtgctgttatgagtgaggacccgtactgactgaccgatttggcagcgccaccaactaatgtcgggaagtgtggactctgtacccgggcgtaccgcgcaatttcctggatcgggcagtagctcgaggtaccggcaatcccttaatctgaataaagctttcaaatcgtcaacgccaacgcataaaggtggttccggttagtgttccttcacttcaagtgtttttattgaagatgtcattcagaatcgctgacacattgtttttcatgttcatcccagctgccagaaatggattgcaagttctcggaagtactagaccacgcctacaatcatcactcgttgctgctcccaagcctgttgacttacctagtttgcgaaaggaaaatgccgggctggaccctacagtgagtttagtgcccagtggagggtcaggatgggcagtaagaaataaggaatctgatgaaacggtgggagctgttgagcatgacaatgcggcatcagggtcaagtgaagagacaggatcagcacaggggccaatcagaaaatcaccacgaaattgggcgataacggcggcgagctcatccccgctgccttcttcccctgactttccaacagcggctgaagcgttgaaaaatcaaaagctggagaagaaggatggcactggagagctgaagacgggaaaagaggcacgggctacttctgcaggcggggacaagatgggcgataacgcggaaaaggcatttgatatta

SEQ ID NO: 4508 - DNA, 1598 bp, Spizellomyces punctatus
  source 1..1598: mol_type = other DNA
atcgtgggagatgcctccactatctttggcattgcacatagttgaaagaccaagagggagtttagcagttctgcggtagagcgggtcttgtagggccgaacactgtctagtgacgaattgtgtgcttgggttgccaacgagcgagtttgaatgagggagcgagcgaggctgagagaacaagaaccgtgcggcggtcggatgcgagtgagttgacggagtggaagggacatggccaaaggttcaaaatggttgctggaagaaaacgaacgcaacaacaaacagtcggctgaaaaacgagggcagctgatatcaaccagttgcttatataatcccaatcgcaaatggaaattaaacgaccgcgcatttggagctacaaatcccgtactgccagataaaggtttttatacaccttcccggcagccgcgacgaaaaaaatcccgtccatcccgcagccgtctgcttgcttctgcatgttacattgaaatgtccaatacggcgacggtgctcgtccgccttaacggctactttattcttgtccacctatcttgtcactagtgtgcaggtggtagaaaatgtcactagggacaaattctccctccaacccactacagccggttctaatttacaattagccagcctgtccaacccttcataacctatcctgcaaacgagttccacccctatcctaactcgctacaggttccagcctgggttgaactggggtacatgaaaagctaactacgactaggcccaattacacatgcaatgcattacggttggttctaaccgggtaactaagcccaccacacgagagaaatcctacttgattccgaaattctttggtcggaggatgtttcagatactagtaaaatcagaatacttagactgggaatatgcatgggaaaatacaaagataatgcatacctgcgatcgtagcaatatagtagtagcagcgtttgcaaagggttatgttgttgttgtagtcgggagggcgaggtcctcggcaccagagcagtactctcatgatggacttgagagttgcttgagtgttgtgcagatgctttgagagtcgaggatgggtaaagagggaagagacagaaggccccccttttatagaccttcagcatgcgcctcaccgcagtttaaaaaaaaacattacatgcatgccacaccacagtttggcgaacattacaatacatgccacaccgctttgagcgatagatgggggtgctgattatgcgatatgattaaccggataaaaatgagtcttagtgccattttcaatcacctccacactaataaatcgttggttcggtaacattccgatgttagcacgtgatatcacatgccatcatgtgcttgcagagtcgcagcgacgaggtcacgtcgttaaaggtgactgtgcctctacacgtgaatacccaaatttggatcacttgactcttccccccctccccttccgcccagctccaaaggaacttgcttttcctatcgatgggtcgggctcgtttcccacgcaggcaatctgagatttacttgccatctctacacgctttttgccaacgacctttacacgataccgacttctagtctgttcc

SEQ ID NO: 4509 - DNA, 787 bp, Spizellomyces punctatus
  source 1..787: mol_type = other DNA
agctttctgggactccgtactcgcattttacgacctgtaaagttggcggttacactgcgtcatcagagtcgacgaccgataccaaaaaacctgggaatggcaaatcttttgtggataatataacgtatcaaactcacggtgagatattcaaatctcgtggctagtttaatgcttgatcgagatggctaattgcctcactgtttgctccgtgtaggattcacaagcgcgaaccagggcaccagggttaccatcccaggaaacgctggcatcaagcttcggcccagcggcactggtaatgctagcgttacagtcaatgtaaccagttctccggatccgataacgtaagttcgagcttgtaatgtgcttaccaaggacgttataccacataaatcccgctgttgctgacttttttgagcagtgctctcacgattccaccgacgggtataaatacctactggagattcgaggctacagctaatgccacgttttcggcggatctctcctggacgtacacggacgcaggtgcgctcatttctagtctctcttcaaaacttcagaattaaacacttttttttattgtgcacctagaccttgctttatttaactataccgccacgagcctcaaatgggccttttacaaccaagtaacaggaacgtgggatactcaatcgggtaccacggtcgacacatccgccaaaacagttggatacactactacacacttttcagagtggactattgtggcgtcagcgacgagtggagcattgtctagtgctccttcattggt

SEQ ID NO: 4510 - DNA, 1597 bp, Spizellomyces punctatus
  source 1..1597: mol_type = other DNA
aactgcatcatcccgctctaatacatagtgtggaggtgattgaaaatggcactaggacgcattattatccggataatccggttagtcatatcgcataatcagaaccccctctatcgctcagattggtgtggcatgcatgtaatgttttttttttttaaactgcggtgaggcgcatgccgaaggtctataaaaggggggccttttccctctttcctctttcctctttacccatcctcgactcgaaagcatctgcgcaaccctcatcgcgactctcaagtccaaccatgagaatgcagatggtggtgccgaggacctcgcccacccgattacaaccaactggaaccagcgcagcctcggaaccaacaaagctgttattatgctgccacatatgttgagcttggttggtatgtactgatggcatctcttgtcattctgtcattcatctcgctgacatgcatttttttgtagtctctaagcctcgtcactgaacatcctctggcttgtgacgctgcccagtcgattcgctcctggatgcaagagtctggcttcaatgccatcaagagttccagatcaaggcctagtagggaccgcgtgtgggggtgggcaattatccggttagaaccaaccgttacgtgtttcgtgtataattgcctagtagtagcttagcttttccgaaccagttgtcgctggtttattccctggtgtagtagctagtgccagtttctgtcacctctacactatatacctcgtacagccattatgaaggacccgcgcctgttcatttaaaaatatcatcataacgaccacaattcgggttgtgtgtgtttgtagagtgtgttgattccctacccaatatgggaaagcgagaagattaacaaagaggtataaatcggggagttcccatcctgtgaacatagatagcatttgacaaacgggtttatagaactgaaaaccgaacccctgctacaaacaaaggaaaaaagcaaatatcggcaaactttgtccgcacttttgagcgtcacttgagccaaacagctacctattacattactgactcggacgatccaaaacaaatgcagaatagtctggtttttcgttacaaaggacgaaaaatacaaactgcaagtagcggagcgcccgctgtgggtgtcgaacccacgaccttaaggttaaaagcctcacgctctaccactgagctaagcgggcctggcattttgctcctggtacttgaattctccatctataatatcttacagagcatctgtggcgcatgcgcacgcgtactgctgggtttgcccccctcttgacatcatcagcaaggatttgccctggcacgctctgcccagcctctcctgtcatccaatcgttcagcccttccatcaccttaaactcacaggattcgctttccttttaccctttattttttttcagaaggcaaacgatcgtctgtcgaccggtttctactcatacgattctacatcaattctcacacccgtcattgttaaccacaagtgtctccccaagtaatatctgctatattgccccgaactgctctcaactcgacagtccttgaagattctacaatgtggttgctgtc

SEQ ID NO: 4511 - DNA, 1264 bp, Spizellomyces punctatus
  source 1..1264: mol_type = other DNA
tatggtgcttgttgctgtgttggttggtgtgctgtccgtgtagttggtaccttgtttgactgttgtgggtttctggggaaagagtatcgtgcagtatttgttccgtcgttaatactgtgtgcaaagtgttccatttgaaagttcggttctacatgaatttttaaagttccggtgcttgggcctcagattgtctacccccacagccaaaaaggatacgactgctttagactagaagacagaacccaagtaagcttttgggcaaatgagcgtcctccagcagctgaaacaaactgtatatttcatgcttctttttcagaatcatatctcttaacttccttcatttcactcacgggagaataacggaaccataccatccataccatttcaacggcacagaatttgtcacgtgctcaattcacattggctgttgaactatttagtgtgcaggtggtagaaaatgtcactagggacaaattctccctccaacctactacagccggttctaatttacaattagccagcctgtccaacccttcataacctatcctgcaaacgagtcccacccctatcctaactcgctacaggttccagcctgggttgaactggggtacgtgaaaagctaactactactaggcccaattacacatgcgatacattacggttgtttctaaccgggtaactaagcccaccaccacgagagaaatcctactaggcctttgattccgaaattcttgagtcggaggatgttcagatactagtaaaatcagaataattagactgggaatacacctgggaaaatacaaaaacaatgtatacctgtgatcgttgcagcatagtagtagcagtgtttgcaaggggttatgttgttattgtcaggagggcgggtcctcgacatcaccacatcggcgttctcatgattgacttgagagttgcttgaacgttgcgcagatgcttgcgagtcgaggatgggtagagaggaaagagggaaaaggccccccttttatagacctttgacatgcacctcaccgcagtttaaaaaaaaaaaaaaacattacatgcatgccacaccaatctgagcaatagaggggattctgattatgcgatatgattatgcgatacgataggatcctagtgccattttcaatcacctccagactaagatttcaagatgctgcgagagaaaatacattcctgcgctgaacataatgctttgtggtttgacccaacccttcaaaaacgcagcaaacagcacataattcacatg

SEQ ID NO: 4512 - DNA, 780 bp, Spizellomyces punctatus
  source 1..780: mol_type = other DNA
ccagcacaagcgcagcgattgctccttaagatgaaagctgaagggctaaaacctgacgtaattaactacaccgcgatgattgcagcgtacgcagccgacagagatgcggagggggctcgcactgcatatcaacaactcttggacgctggattgacccctacaatgatgactatgaacacggttttatctgcatccgcacgaactggcgacgctgctctcgttcactcctttctagtgcagatggagcaacacggcgtcacacctgatagcagtacctacgagaccttgtggcaaggttacgcagtcgctggtaatgtaccggaaatggagaaggcgctcaactcctatctgcggatggcggggcacgcgaaagtggatttgggtgtatttaacaagttactaagaggccatgcacgggctggaaatatcccaggtgccctcgaatgtctcaaagggctctacgcagctggctgtacgccagatgcacggacgttcacggccatgatggaggtctgcgctcgtggaggggacgtattgggagtcggcgagtggattggcaaagctgaaatggctgggataaagctcgacgccaaggccattgcaatcgtcgtggacggatttatcaaaagcggcaacgtggatgcagcgtggtctgtggtgagacgagtcactacagtcaaccttgatgctgccgtattccatccttttgtggatctctatgcgggtcttcaagatgtggcgaaaatgcatgaagtcctacaggaaatgtacgaacatgga

SEQ ID NO: 4513 - protein, 538 aa, Spizellomyces punctatus
MLHIVPLTTAVPSTARRLFSRLLTTSVAASQLPALKLFNSAVRRQRKTAIVSQGQEYSYGQLLEDAVALRNRVGHGKEIDLTSSRRIAFLFPRSYEYVVAQWGVWSAGAVAVPLCTSHPVPELDYTLTDAEADTVIFHPSFRNRIEPLREKLRSLNWIELDDIPVRNTIDDVQFDQVPFLNSNGALIIYTSGTTGKPKGVLTTHANIEAQVESLLEAWKWTEDDKIIHVLPLHHVHGLINVLTCALWAGATCEFLEPFNADATWQRWMSEKKDLSLFMAVPTIYSKLAHAYHSMSPEEQTKATEACRPFRLMVSGSAALPETVFAEWERISGHRLLERYGMTEIGMALGNPYEGPRIPGTVGRPFPGVQVRIENEHGQNVVDQPDEAGELVIGGPQVFKEYWNKPEATRKEKVNGWFRTGDIVSRSQDGVFRILGRASVDIIKTGGYKVSALDIEREMLEHSAFRDVAVVGLPSEEWGEVVGAMVVLRQGHTIELSDLREFLKERLASYKIPRVLKVVDELPRNAMGKVNKKALRALF

SEQ ID NO: 4514 - DNA, 1187 bp, Spizellomyces punctatus
  source 1..1187: mol_type = other DNA
aaaatacctgcatatatgtcagaaaagaaattgacctgacatcttcgcgacgcatagccttcttgtttccgcgaagttatgaatatgttgttgcacagtggggagtatggagtgcgggagctgtcgctgtgcctttatgtaggtgactgcatatcgataacttgctcaaaaaagtttccggaggactaacatcgccacaggtacaagtcatccagttccagaactcgattacactcttacggatgcggaagctgatacagttatctttcatccgtcatttcggaatcgaattgaaccattgcgggagaagctgagatcgttgaattggattgaattggatgatatacctgtacgcaacaccattgacgatgtggtcagtattgtcgcgcacaaaagggcgatgctgggcatactgaataaagtaccatgatgtcaggacagcaatttgaccaggtccccttcctcaactcaaatggagctctgatcatctacaccagcggaacgacaggtaggtagacgacctgcattttgcggtctgaacatggtaaataaaacaagttgcaaggaaaaccaaagggtgtcctaacgactcatgcaaacattgaggcacaagttgaatcactcctggaggcttggaagtggactgaagatgataaaattatccatgtcttgcctttgcatcatgttcatgtgagtagtcctcttcagcatgggggacttcctgagttttttttagcttctgtcctctgactattttgatacgatacaggggcttatcaacgtacgtgtaatcgccggtcgtttgacaaaccatggggggctttcctaaacttgactgaatgaaggtcttgacttgtgctctatgggccggcgctacttgtgaattcttggagccattcaatgcagacgctacgtggcagcgttggatgtctgagaagaaggacctatcgctctttatggcggtcccaacaatatactgtacgctgtgaacactagctcataattcacaacatcacaccattaatacgtacgcttccagcgaagttagcgcacgcctatcactccatgtctcctgaagaacaaactaaggcaacagaagcctgtcgtccgttcagactgatggtgagcggttccgccgccctccctgagacggttttcgcggaatgggagcgtataagcgggcatcg

SEQ ID NO: 4515 - DNA, 1681 bp, Spizellomyces punctatus
  source 1..1681: mol_type = other DNA
gttaaaccgaacgtagttacttggacatgtgtaatcaatggcctctcaaaggcgggcctcgccaaccaaggtgtgaagatctggagtgcgatgaggactggcggggttgtgacccatgatacgcttcaatggaaagtggatcctttagcggatgaagagctgcaagctggctgcggtcctttgatcgctgtcgtttttgatgcattcgggttcggcgacatggtaaaagaagccaagcggtattgggctcaattgaaaagcgaaggcaaagccttgaatgaaaatcatcttgccagttacgtagagtgtctctcgcggtgcggcttggtcgatgaagcttatgatattgtcgtgaaaggcgacggtccacaggcgggaacgaaaacgtttgggacattgttgagtatgctgatgagggagcaaagattagattgggctagagatgttttgaatcttattgagcatcaaggcgtgtgggtaatggatgctgtaaaaaggaagtatcctgggttagtggaggacatcctcagtgtggaggtgattgaaaatggcactaggacccattattatccggattaatccagttaatcatatcgcataatcagcaccccctctattgctcaaaacggtgtggcaggtattgtaatgttttttttttttttttttaaactgcggtgaggcgcatgctgaaggtctataaaaggggacctgctccctcttccctcttgtttctttaccctcgactcgaagcatctgcgcaacgctcacgcagcactctcaagtccatcattatgagaatacagatgtggtggtgccgaggacctcgccctcccgacaaaaacaacataaccccttgcaaatgctgctactactacattgctacgatcgcaggtatgcattatctttgtattttcccacgcggattatccagtctaattcccattaccttagtatctgaacatcctccgactaaagaatttcggaatcaagggcttagtaggatttctctcgtggtggtgggcttagttgcccggttagaaccaaccgttatcgcatgtgtaattaggcctcgtggtagttagcttttcacgtaccccagttcaacccaggctggaacctgtagcgagttaggataggggtgggactcgtttgcaggataggttatgaagggttggacaggctggctaattgtaaattagaaccggctgtagtgggttggagggagaatctgtccctagtgacattttctaccacctgcaccctaaaaaaaaatacatgatcgaccactgcttacaaaacgaatggatcggctgaagccacacttgtctggatctagccatttgatcctgatatgatcggaagtgctgaggtgatgccaggcgtttgccagtcctcatcttggcataatgctccacattgtgcccctcacaacggcggtaccgtcgacagctcgtcgtctgttcagtcgactacttacaacgagcgtcgcggcctcacaactacctgcactcaaattgttcaacagtgctgtgcgccgtcagcgcaaaacggcaatagtatcgcaaggacaagagtacagttacggacagttgttggaggatgcagtggcgttgcgcaatcgagtaggacatgggtatgtacctttgaaatcgttccgcgtatccaagatttggtaaaacta

SEQ ID NO: 4516 - protein, 309 aa, Spizellomyces punctatus
MYTTEPTSLPPRTTIRTLSIARHADIVNTPHWRQKEVAALRNGIRATVYMTNGDRYVGEWKDGLKEGNGTYCYASTGAVYEGEWARDLRNGFGTYSVPALPQPVQGKTKKPLLPSLPTLKTPPRAQSTPGSHTGPLRKVYAGSWLDDLRHGRGTCFYEDGSVYDGMWEEDVREGWGRMTYKSSGSVYEGEWHEGMRHGQGVLVLANGDRYEGTFLNDMKEGPGRFIYRTKRQCYEGEWALDTPKCGTLRDLPPLAGPEGMGPNARKWWPIPELKLQDPAGILDHEREAVLQERLQRIMGESLEHDGEAG

SEQ ID NO: 4517 - DNA, 874 bp, Spizellomyces punctatus
  source 1..874: mol_type = other DNA
gctttggtttgagttcaaacactcaacaacgaggaagaacactagcaccatgtacaccacagagcctacctctcttccgccccgaacaacgatacgaaccttatccattgcccgacatgctgatatagtgaatactccacattggaggcaaaaagaagttgcagccttgcggaacggaatacgggccaccgtatacatgacaaatggtgatcgttatgtaggagaatggaaggatggtttaaaagagggttagtgagtgttatattttggtagacaaggaagcggagatttatttacaaaatgcataggcaatggaacgtactgttacgcaagcacgggggccgtatacgaaggggagtgggcaagagatcttcgcaacggatttggaacatactctgttccagcattgcctcaacctgttcaaggaaaaacaaaaaaaccattgcttccttcgttgcccaccctaaaaacgccgcctcgggcgcaatctaccccaggttctcatactggccctctccgcaaagtctatgccgggtcctggcttgatgacctccggcacggccgtggcacttgtttctacgaggacggctcggtatatgacgggatgtgggaggaggacgtccgggagggttggggacgcatgacgtacaaaagtagtggcagcgtctatgaaggagaatggcatgagggaatgcggcatgggcaaggcgtattggtcttgggtatgtatctgcaattgccttcatttccaattctgtattttcctcactctcaacctgtgatagcaaacggagaccgatacgagggaactttcctcaacgacatgaaagagggtcctgggcgatttatttatcgaacaaagcgtcaatgttat

SEQ ID NO: 4518 - protein, 339 aa, Spizellomyces punctatus
MKTIYLLAAGIAPALFFAPTLAAPAPQDLAVEEEVQAAGGWWGPQIINNQNKKDQKNSAFLNNNNQNNFNQNNLKKDHLRANNNNNVLHKKNQNNSIKKDHLNKNNQNANNQNSNKKNVNNNNHFNKQNKKFEVEAADVKEEEVEVAGGYGGYGLGYGGKGKKFGGYGGYGGYGYPYGGYGYGKKFDVEAADLENEEVEAAGGYGYGYGGKGKKFSGYGGYGYPYGGYGYDAEAAEVENEQVEVAGGWWGPQIINNQNKKDQKNSAFQNNNNQNNFNQNNLKKDHLRANNNNDVLHKKNQDNSIKKDHKNLSNTNAFNNNNSKKSNQNHNFHKQNKNQF

SEQ ID NO: 4519 - DNA, 1176 bp, Spizellomyces punctatus
  source 1..1176: mol_type = other DNA
ctgcttatggaagttgtgattctggttggatttcttcgagttattgttgttgaaagctatggagctgctggttaatatccgtatgagaccatgccagatatgcactaggacataccatttgtgtttgacaggttcttgtggtcctttttgattgagttatcctggttcttcttgtgcagcacgtcattgttgttattcgctctgagatgatcctttttgagattgttctggttgaagttgttctggttgttgttattctggaaagccgaattcttttgatccttcttattctggttgttgatgatttgagggccccaccatccgccagcaacttcaacctgttcattttcgacctcggcagcttcagcatcgtaaccgtaaccgccgtagggatagccgtagccaccgtaaccactaaacttcttgcctttaccgccgtagccatagccataaccgccagcagcttcaacctcctcgttctctagatccgcagcttcaacatcgaacttcttgccgtaaccgtaaccgccgtagggatagccgtaaccaccgtaaccaccataaccaccaaatttcttgcctttgccgccgtaacccaagccataaccgccataaccgcccgcaacttctacctcctcttctttgacatccgcagcttcaacttcgaatttcttgttttgcttgttgaaatgattattgttgttaacatttttcttattgctgttctggttgtttgcattttgattgtttttattctgtaatgacggggaatcatgcgataaattaaattctggccccaaacgatgaaaatcacagcgtacacaccaaatgatcttttttgattgagttattctggttcttcttgtgcagtacattgttgttgttgttcgctctgagatgatcctttttgagattgttctggttgaagttgttctggttgttgttgttcaggaaagctgaatttttttgatccttcttattctggttgttgatgatttgaggcccccaccatccgccagccgcttggacctcttcctctacagccttaaacgatgaatgaaggatgatgagcaagacgacaggatgggccaagggacagccgctgtaatcgacggtgcaagcataccaagtcttggggcgccggagccgcgagagtaggcgcaaagaacaaggctg

SEQ ID NO: 4520 - DNA, 1681 bp, Spizellomyces punctatus
  source 1..1681: mol_type = other DNA
gaaggtgaatgggcattggacacgcccaagtgcgggacgttgcgggacttgcccccattggctggacctgagggaatgggcccaaatgctcgaaagtggtggcctatacccgaggtaagcattgcggtgtgatagcgagaccgctttcgacatgtggagctgtaaactcacccagttttacactattgttagctgaaattgcaggatcctgctggtattctcgatcacgaacgcgaggctgttctgcaagaacgtctacaacggattatgggagaatctttggaacatgatggagaagcgggttgaatcatagccacatatttgagctccattgactttccggtgcttggcactaacgaacacatcgtgtgcatcaatgtagcagcattatagctgtctatgtagaaataagcaacataaccacttgcaattgtcaaaaggtgtgcaatgccattgcgaccttcgtaatacctcctcaagaaaatgggttgtattactgacggaacggctttatcttagtgtggaggtgattgaaaatggcactaggaccctttattatccggattaatccggttaatcatatcgcataatcagcaccccctctattgctcaaaacggtgtggcatgtattgtaatgttcgccaaactgtggtgtggcatgcatgtaatgtttttttttttaaactgcagtgaggcgcatgccaaaggtctataaaaggggggccttttccctctttcctctttacccatcctcgactcgcaaaacatctgcgcaacgctcacgcagcactctcaagtccatcatcatgagaatgccgctctggtgccgaggaccttgccctcccgacaacaacaaacataaccccttgcaaacgctgctactactatactgctacgatcgcaggtatgcattatctttgtattttcccacgcgtattcccagtctaattcccattaccttagtatctgaacatcctccgactaaagaatttcggaagggcttagtaggatttctctcgtgtggtgggcttagttacccggttagaaccaaccgtaatgtattgcatgtgtaattgggcctagtggtagttagtggaatcgtgctgctttgcacgtaccccagttcaacccaggctggaacctgtagcgagttaggataggggtgggactcgtttgcaggataggttatgaagggttggacaggctggctaattgtaaattcgaaccggctgtagtgggttggagggagcatttgtccctagtgacattttctaccacctgcacactatcgtaaaaggcagcatctcataagcttgtacagcccatcttgataaattacaattaacgagtttttgaatgatcttcatattccacgcagcaccatagcgcagaggaagcgcgcagggctcataaccctgaggcccctggatcgaaaccaggtggtgctactagttggatattatcgtggcaatttttttttcactgtccactacattggaggcattaacgcgcgctaatgtacaccatatttctttggactgtaccataatccttgaactaatgcgctgaattactctctttaccacacgaacgagcataaacaaaaactcgacatgcaggaataatactgttgatatgacactacggctaatgaaatgtttccctagaactggttcttatt

SEQ ID NO: 4521 - DNA, 262 bp, Spizellomyces punctatus
  source 1..262: mol_type = other DNA
ggtagggggtatatcagtaagggcttttagggcagagaacagccttgtatcaactaccaaataacatattatctacatgcagctatgttagaatcagtaccgtagaaaggcgagggtgtaagagaggagccttcctgcaacgctgcagtagtattagaaagaaggggaacaggaacttgcgagatcagaatcgggcggtggaggtcaaatggaggcaacgtttgtaggaaatcgccaattgtcaattctttcagtctgaata

SEQ ID NO: 4522 - protein, 415 aa, Spizellomyces punctatus
MKSSIDSTQTCIATPNYAGFVPNLKHQYGLTYGNATRHILRTDPTIKSGIIQQSIEKRRGLSQDAGDRLKEDVVVKVKCEGDDAAKWVWSTAKKYATGDDRFSFPPVPGYTGYIPRSQEHFGRPYVETTNASLTDFHQMLKTKATLPHRIEAIQQHKSRNTTQRPVQTKRSFSRSVPHGGGFAAGNASGASGFAPVPPPAGRSAGSASSPIDDMSPYKLPQHHPQKTFISGYTGFVPRLQNHFGEPYSDNVREALDEFTAPRTRQDPYKHIKEQSADTPATYVSPKDTVKVNVGKARPIPGFTGFIPGSRTYYSATFAKTAEVAYEQFNNRDGKSHAISQPPSLPPKDLAKSQPIPGYRGHIPTFIFQGDRPYGISSKACIEAFDRERARYNREQDMYKAKEAAEKIRRHNGVTV

SEQ ID NO: 4523 - DNA, 532 bp, Spizellomyces punctatus
  source 1..532: mol_type = other DNA
ccatcccgattattgaactgctcataagcaacctcagcagtctttgcgaatgttgcagaatagtatgttcgactcccaggtataaatcccgtaaatcctgaaggtaatcattgattaaccaacgagaacaatgacatcgcacaagcaaaagtcttcgtaaacgtaccgggaattggtcttgccttccccacattcactttaactgtgtctttgggactcacataagttgccggggtgtccgcgctctgctccttgatgtgtttgtacggatcctgacgcgtacgtggagcggtaaattcgtccaaagcttcccgaacattatccgaatacggctatttgactttccaataagtatgcaatggtttagaaacatcagatatcatatcctttacctacctcgccaaaatgattctgcagcctaggcacaaagcccgtatatccagaaatgaacgttttctgtggatgatgttgcgggagtttgtacgggctcatatcatcgattggagaacttgcactgccagccgatcgtccg

SEQ ID NO: 4524 - DNA, 1610 bp, Spizellomyces punctatus
  source 1..1610: mol_type = other DNA
gcgagcgctacgtgatatcaagcgatataatccgatcaaggaacaagaacaggcaggagtgaagctttcgcagaaatgttcgctggttcgcctatggttgatgatcgaggcgagacttctggtttgttaccagcagagtttattcttaaagagctcaggacagcagaagacggtagaatccctgcctcaatgatcttgatggggcagttgcaaaaacaaaggcaatggtgaacggaagatctgcagttggaaaatcaaaagttcaaaacgcttgcttggctggtcagcgaaacggatatcacccgcgtcacgtttgtttctctatccaaaaaaggaaataatgaaatcactgctgacggcatcaacagatccttggatatttagtgtggaggtgattgaaaacggcactagaactcattattatccggataatccagttaatcatatcgtataatcagcacccccatctatcgctcaaagcggtgaggcatgctaatgtaatgttttttttttcctccaaactgtggtgaggcgcatgccaaaggtctataaaaaggggtccttctgtctctttcccctttcctctttacccatcctcgactcttgaagcatctgcgcaacgctcacgcagcactctcaagtccatcatcagaatgctgctctggtgtcgaggacctcgtcctcccgacaacaacaacataaccccttgcaaatgctgctactactacattgctacgatcgcaggtatgcattatctttgtattttcccacgcgtattccgagtctaattctgatctacctagtatctgaacatcctccaactaaagaatttcagaatcaagggcttagtaggatttctctcgtgtggtgggcttagttacctggttagaacaaccgtaatgtattgcatgtgttgggcctagtagtagttagctttgcacataccccagttcaacccaggctggaacctgtagcgagttaggataggggtgggactggtttgcaggataggttatgaagggttggacaggctggccaattgtaaattagaaccggctgtagtgggttggagggagaatgtgtccctagtgacattttctaccacctgcacactattttgaatgacatgcgttttcttccatccaacaatacccgccagatggcaattccacaaaaaagtacacaggattgagaagagatactagtcaagtattcctcaaaagtcatcagcccgcaatcaaaccgtgaccccgttgtgtcgccgaatcttctcagcagcctccttggctttatacatgtcctgttcacgattgtacctcgcacgttcccgatcaaaggcttctatgcaagcctttgaggagattccgtaggggcggtccccttggaatatgaacgtagggactgcacaaaattgatgatcagtattcagtttggtcgcaataccatcaacagagaagtatcatactatgtccacggtatcctggaattggctgcgatttggccaagtcctttggcggaagagaagggggctgacttatggcatggctgtgcgtccaagtcaatgtctgctgtggggatctcaagcagttctccacgaaacctacctctta

SEQ ID NO: 4525 - DNA, 637 bp, Spizellomyces punctatus
  source 1..637: mol_type = other DNA
gatattcaacaattccgtttcaaaaacaagagtagcgcctgccgggatcttgtctcccgcaccgcgatcaccatatcctaatatcaaaagaggttagcagcctgccggccatgtaaatgggtgtttcaagtcgacaccaacctaagtgtgcgggaataaccagccgcctcttttctccaacgcacatgccaaccagaccttggtcccatcctttgatgacatgtccctgtccaagagtgaaatcaaacggctggttccggtctaacgaggaatcaaacttttcgccagtgtcatagagggttccagtgtagtgcatagaaaggacgtcttcaaatgcaaattgtaagcaatgatgctagtttcacacccactaaagtagagtgacaccacgcaagacattaaattcagcggagagtccacaagtacctccagcggccgctgtttctttgcaatcttcttttggaacacgttttttgattccaatttgcagctgagttggtgggggtcgcttgggcttttccgctgccgcttggaaaggagcagacagcagaacgagaaccaacgtgagaagaacgagtaaattgggcattcggagagtgagcatgatgaatgatctcttgcgcgctcctagcgaggg

SEQ ID NO: 4526 - DNA, 893 bp, Spizellomyces punctatus
  source 1..893: mol_type = other DNA
caaccgattcagttatattcttttcttctcccctgatcttgtccaagtgcgaatgtcaatttgaaaaaaaggaaaaggaactagtacaaaaaagaaattctgccttccaattcggggtttactttctgtgttattttacgtttcccacccagccagagggcttgccggggggatataaaaagtagtgctgggcttgacatggagcccccttttggcgctcgttcttcctgctactagtacctcattgtggtgattgcatagaggaaataaccaatcctccctgcatcaacccatcaacaccattttgcaagtgtttgcccatatatttgttcaccgccatttgagcctggcatcccagttatcatgagtaacgcgcaagacgtaaaggtcggccacactgtggagaacctccaagatccgatcggcgcctttgatgacatcaaaaaagatgtggaagccgaggttcatacggaaaaggagggtgaatcccaggccgtggatgaattggtcgcagcagccgtcgaagaaaccgacgatcctgctactcccgtcataacctttaggttcatttctatgagcatcttttgggctgtcgccgtttccgggatcaatcagtacatgtggttccgtgccttgcccattcagcttcaaactgtcgcggtccaactgctttccttctttatgggtaagaatattttcatgtcattcgagaaggacctaaacattctcaacatgtaacttgactgctttgcgcctgcagggaaatttttggagcgagccctgcctaccaccaaatatcacctcccactcattggtgaatggactatgaaccccggtccgttcaacaagaaggaacactgcctcatcaatgtttttgccaatgctggcttcca

SEQ ID NO: 4527 - DNA, 1612 bp, Spizellomyces punctatus
  source 1..1612: mol_type = other DNA
aactacgagcagtgcttcatgtgtgctgtgccacaccgtcaggtttcctaatcctgtgtacgaatttgaatggtccttcgcccattttctacaagattgaaatagttgtgtgctgccatttatcccacacggcacgagaaacagttccgcgacagtccgacatggtaatgaagaggagcacaagtgactttccgcactgatcgtttacacatgaaaccatggcgattctaaagaatcgagttacatgccttggatactgtgcgttattgagtttttggtaatgttgctcttgtttcacttcagacttgtagtagaccgtgataagcctgctcttgccaagctttcagggttgaccaagtcgatgagcgtcatttccactgccatgtccttctcgcataatgcggcaagtcgcagagggaagaaaacgggtcgttggccaccatggcaacaagcagctctacagacagtgtcatgtgactgaacaccttttgccaagaacaattttagtgtgcaggtggtagaaaatgtcactagggacaaattctccctccaacccactacagccggttctaatttacaattagccagcttgtccaacccttcataacctatcctgcaaacgagtcccacccctatcctaactcgctacaggttccagcctgggttgaactggggtacgtgcaaccaactacaactaggcccaattacacatgcaatacattacggttggttctaaccgggtaactaagcccaccacacgagagaaatcctactaagcccttgattccgaaattcttagtcggaggatgttcagatactaaggtagatcagaatagttcgactggataatccgcttgggaaaatacaaagataatgcatacctgcgatcgtagcaatatagtagtagcagcgtttgcaaggggttatgttgttgttgttgtcgggcggacgaggtcctcggcaccagagcggcattctcatgatgatggacttgagagtgctgcgtgagcgttgcgcagatgcttcgagagtcgaggatgggtaaagaggaaaggggaaagagacagaagccccctttttatagacctttggcatgcgcctcactgcagtttaaaaaaaaagttacattagcatgccacaccgctgcatgcctcaccgctttgagcgatagatgggggtgctgattatgcgatatgactaaccggattaatccggataataatgagttctagtgccattttcatacctctaaaagcttaaaatcttgtttgtgcgcggattcgcagtaatgcgcggttgatttgtccgaggtgtgatcatgaagatcgttcgacaagaagttttccttttttctaagcggaccgcgccggacggctgggggttatcaacggacgatacgggtagctgcaggtgtgatggatatcaccccgcctgaacacattcattttgtttgacggtttccgtgtattgcaccgactgataaaggaaaagttgaaagtgttgtcgttgatttgtcccctcacatgcacaaagggaggtacgcgcggcctttgctaccacaatggacagctctttgtgctcgtcggtatcaatatccactagaggtggtacg

SEQ ID NO: 4528 - protein, 304 aa, Spizellomyces punctatus
MGHQQSSFYTPESTRALLEESIEHVVLFNRPLVTLEPTTTLLETIKTFRIKNISCAPVVRSNTDFVLTDVVDIATFLSNAYAQLGRSTFEEHLKDIISVPCEDLADFSSRNPTITLPATSTVHTVLKTLQQHRATRLILLSNQTIHHIVTQSSLVEFALLNLDRLHLRPDASLLDLGFVGTTPVFACGENKVVLEVLKEMRERGVTAVPVVNSGMVMSGMMTVRHIKTLNSNNVQDLFLTVRELLKKNSATYITGTWTMSLRDLLRVMVVNTFHHLFFVNEGGKPTNVITLGDVLDFLFSMQIE

SEQ ID NO: 4529 - protein, 279 aa, Spizellomyces punctatus
MPLLAFTWPHPAQTVHVTGTFDSWSHSLPLEKQPDGTFSAEKEVEEGEVVFKFIVDGVWRVNEEVGTLRDAEGNINNVVRVEASRDKPLERKDGEIPTHPDTHILQSVSLLDAAKSAQEDAKAIQEAASTVTDESAIPIKEETVSSEHLDTTPTDTTPTDTTTVNPAREPPSTTAPIDPEILHPVSLLTSTKAVQDDAREIQDVASASVPVAPVSATSHAAKAAEHTTANDGEHSNIPDDDEQWDADSENEENVDKVSEQHSIVEQDVAKSRWWFCVVL

SEQ ID NO: 4530 - DNA, 268 bp, Spizellomyces punctatus
  source 1..268: mol_type = other DNA
atccgcatcccattgctcgtcgtcatcaggtatgttggagtgctcaccatcattcgcagtggtgtgttcagcggctttcgcagcatgtgatgttgcagagactggggctacggggacactggcggatgcaacatcttgaatctctcttgcatcgtcttggacagctttggtggaagtgagaagggaaacagggtgcaatatttctgggtcgataggtgctgttgttgatggaggttcccttgcggggttgactgttgttgtgtccgtc

SEQ ID NO: 4531 - DNA, 1598 bp, Spizellomyces punctatus
  source 1..1598: mol_type = other DNA
cgaggataatttagcattccggttacccattcgcatggtctccaaagaagaatgcgtaccggtattagacctcacaacaggcgcacatgaaatattctttatcctaaaggtctgcacaatattactcactctcccaagatcctctttgcattacgcacaagacataccttgatggtctccagtagtgttgtcgtgggttcaagtgtcaccaacggacctaatcagcaaacttcagcatggcagttcatgcgaaataaaaccaaagtcaggaaacgcacggttgaacaggacgacatgttcaatagattcctccaggagcgcccgcgttgactctggagtgtagaatgagctttgttggtgacccatttaattgtcatgctccaacagttgtcatgcgttccattgtcgacaaggtgtgaggctccaaaaggaacgatctgcgacaaggtttgcagtggacaggtggagtactaagcacgtcatgataaactttaattttcaacgcttttggatttcttagtgtggaggtgattgaaaatggcactaggacccattattatccggattaatccggttagtcatatcgcataatcagagccccctctatcgctcagattggtgtggcatgcatgtaatgtttttttttttttttttaaaactgcggtgaggtgcatgccgaaggtctataaaagggggaccttctgtctctttcccctttcctctttacccatcctcaactctcgaagcatctgcgcaacgctcacgcagcactctcaagtccatcatgagaatgccgctctggtgtcgaggacctcgccctcccgacaaaaacaacttaaccccttgcaaacgctgctactactatactgctacgatcgcaggtatttcttgctgattttcccacgcgtattccgagtctaattctgatctaccttagtatctgaaaatcctccgaccaaagaatctcggaatcaagggcttagtaggatttctctcgtggtggtgggcttagttacccggttagaaccaaccgtaatgtattgcatgtgtcattgggcctagtagtagttagcttttcacgtaccccagttcaacccaggctggaacctgtagcgagttaggataggggtgggactcgcttgcaggataggttatgaagggttggacaggctggctaattgcaaattagaaccggctgtagtgggttggagggagaatttgttcctagtgacattttctaccacctgcacactaaggctaggaatgcaaaacacattttcaaagctttgcatttcaagatacaggttcaaggaagagtgtgaaagatcaaatcattcgtattatacatatttcatatctaagccgtcgtttccatatataccaactcgtgcatatccatccagcactttatgatatcccataccacgccgtagatctcaacggatatatcagtcctcacgtattcacatccataatgtaccaaggtatatgataaggcattacaacacaacgcaaaaccaccatctcgatttcgcaacgtcttgctccacaatcgagtgttgttctgataccttatctacattctcttcattctcact

SEQ ID NO: 4532 - DNA, 1161 bp, Spizellomyces punctatus
  source 1..1161: mol_type = other DNA
tattatcctcgttgaaagtttaatagctttatgagaatatctggtctggctatgaaagatttgacaccaacggttttgatcagagagtatgtacacactgctaggtataacattgcgcaacataccttgctccccccacataacagttccattcgattttgctacccggttcttgtcaacattcttgtagatctctggtctctctatcgtcaagggagagcatgtcaaacgatatgaaatcatttaaaacatgatttcgtccaatgttgcccacctgacccctcaggatcttgcatcctatactgcattgccatccacgctacaataaaaaatcacggtttatcccctgcttttcgctccacctgcgcatttgtcaacgtactgtcatttagatgctgtgcagcttctttgtggttgaaggctagtgtcaagagggattttgcgtcaaaggattttcctcgagctagagtttgtattgatgtttagttggacggaggctgctggcgtgcggaaagcaacggtactgacctcttgaggtatcccttgacatgatgtaattgattgtgagatcgtgacaatatgggagggaatgggggagtgggaagggtggatttggagcgtgcgcagtagatgtggatggagattggtttatcaagcggtgctggggataatagtgattctttgtcaagatgggatgcggaaaggacccaaaggcggatgtcacggtccgttggtggattcgaaccatgtccttttgtttggatttggtttggagcttgttgaggagtgcgatactcgtactgtaacctcaccatcaactgacgagattggaggtaataagatgggcgcccaaagctcaaaagcagcacggaggttcccaccacgaccaacctcaggtgcatctccatccacaccaacacctacgccgacagcgacaccttccgccgccccacctcacatgaacctcgggcctcatcaaccactacatgccaatcaagctacgacggcatccacagagacaaaagaggatccccgagaggagcataagcgactgttggagcattatcaacagatggcttttgatgtgcattctatacccaagcgagagtacagaaaggtgggataccattgtgccaaaattcacaatttatgcattctcct

SEQ ID NO: 4533 - protein, 255 aa, Spizellomyces punctatus
MRKGPKGGCHGPLVDSNHVLLFGFGLELVEECDTRTVTSPSTDEIGGNKMGAQSSKAARRFPPRPTSGASPSTPTPTPTATPSAAPPHMNLGPHQPLHANQATTASTETKEDPREEHKRLLEHYQQMAFDVHSIPKREYRKDNELLNILAKRDQNTVQDQRPPSAQTLPGTLRRLPTRDIADLFALRRMAGPAAWPPSKLAEKYGLDEKIVDILLRYYNTHETVGMAGGSERMDGIWVEDLVEFRKREAKGKGGL

SEQ ID NO: 4534 - protein, 258 aa, Spizellomyces punctatus
MATFSRLLARMGNHMNVLTKCSRPFVTSSSVAAWSGTPKKQYIKPSPPSNLPPKSSEPRGTEKRAVRAEALRKGPLATDLFTGNGQQGQGYYKNVATEPLSKEIATKLMRPVKVEDLEIDPDRGYVYLKEATYREMLDDAFGQDGWKLVPVTPFQETSSGNVVYRAYTLIVNDRFVSEAIGDWSVATAGSRAAAEAKCDHAALVRVGKDLGMASELWDPVRSNQLRDAKFTQEWIVDPKLGSKRRVWREKKVSKAPGF

SEQ ID NO: 4535 - DNA, 1023 bp, Spizellomyces punctatus
  source 1..1023: mol_type = other DNA
caccgaaaaagcagtacatcaaaccctcccctcccagtaacctacctccaaagtcatccgagcctcgtggtacggaaaaacgagccgtaagagccgaagcactgcgaaaggggcccttggccactgacttgttcactggcaatggccaacaaggacaaggttactacaaaaatgtcgcgaccgagcctctgtcaaaggaaattgctacaaaattaatgcgacctgtgaaggtagaggacctagagattgaccctggtaggtgcaagtgaatgtgatgtattcggtatgtggagcttcaacatgcgcgttcactctagatcgcggatacgtgtatttgaaagaggccacatatagagaaatgttggatgacgcttttggacaagatggtacatttggaatattttttccatcggatttttaccatgtcttacgatgattgcagggtggaagctagtccccgtaaccccatttcaagaaaccagtagcggaaatgtcgtgtatcgtgcatacacactcattgtcaacgaccgctttgtctctgaagcgatcggtgattggtctgtcgccacagccggtagcagggctgccgctgaagcaaagtgcgatcacgcggcgttggtgcgcgttggaaaggatcttggcatggccagtgagctctgggatcccgtgcggagtaaccaattgagggatgcgaaattcacacaagagtggatcgtggatccaaagttgggcagcaaacggagagtgtggagggagaagaaggtgtcgaaggctcccggattttaatgtagagcgagtcagtcttccgagacggcttttgcgtacccattttttgttttatatgttcattttacctgtatttggtgtataaatgatatattttggatcctgctatgaggtttttgagtggagtgatcaatctcgtgcacgcctggcaaaaatcagttaggatgaagctcataaaatgcagcaggtccctcgatggatagttgatttaaaaccaccatagaacaggccagtgcc

SEQ ID NO: 4536 - DNA, 1372 bp, Spizellomyces punctatus
  source 1..1372: mol_type = other DNA
gacacaaatgtacgacaacaggacaacgaacttctcaacattctggcaaaacgcgaccaaaacactgtccaagaccaacgccccccatccgcccaaacccttccaggtaccctcagaagactacctacccgtgatatagcagatctatttgccctccgacgcatggcaggccctgctgcatggcctccatccaaactggcggaaaaatatggattggatgaaaagatagtggacattttgttgagatattataatacccatgagacggttgggatggcgggagggagtgagcgcatggatgggatttgggtggaggatttggtggagtttcgaaaaagggaggccaaaggaaaagggggtttgtagattgtattcgaactgggatttggtatcttagtgtggaggtgattgaaaatggcactagaactcattattatccggattaatccggttagtcatatcgcataatcagcatcccctctatcactcagattggtgtggcatgcatgctaatgtttttttttaaactgcggtgaggcgcatgtcaaaggtctataaaaggggggccttttgctgtctctttcctctttcctctttacccatcctcaactctcaaagcatctgccaaacactcaagcaactctcaagtccatcatgagagtactgctctggtgttgaggacctcaccctcccaactacaacaacaacataaccccttgcaaatactattattactatgctgcaacaatcacaggtatttcttgctgattttcccacgcctgtattccgagtctaattctgatctaccttagtatctgaacatcctccaactaaagaatttcggaaggatttctctcgtgtggtgggcttagttacccggttagaacaaccgtaatgtattgcatgtgtaattgggcctagtggtagttagttagtggaatcgtgctgcttttcacgtaccccagttcaacccaggctggaacctgtcgcgagttaggataggttatgaagggttggataggctggctaattgtaaattagaaccggctgtagtgggttggagggagaatttgtccctagtgacattttctaccacctgcacaactaatatttatatcgaatgcattgggtggactgcattcaaagccgccctgaacgttattcaccttgaatggaacacgtgattagcgaaccagtgtcagccaactgtcaaagatcgtccacagatcttgcacctagaggttgacattccaccgcgacggaatggcaacttttagtagattacttgcccgcatgggcaaccatatgaacgttctcacgaaatgttcaagaccctttgtcacatcgtcttctgtggcagcctggtcaggca

SEQ ID NO: 4537 - DNA, 1211 bp, Spizellomyces punctatus
  source 1..1211: mol_type = other DNA
cgactgtcctccaagcacggagccgactacgaatcccacggtcgctctcgatcatcttaggaccgcacatggcgtagatgtgaagaacgcccatcacgttttaccgtacctggacagatacattgaacactgggcgaagtgtattcgtgagcagggaatagagaaagttggttacaaatccgaccacaaaacaccagatggaaagcctatgtacattttgggccatgattcggacctagaagacaaggtattccgggagaagcttcaaagagacaatttgaatcaaatgctcaagattcaagaaagggagagaaacgaggagtcccatataccacgcaaatgtctcttttgcaaggttgtctgtgacagcagaacactattattccgacacatgttcagcgagcacggtttcaacattggcttacctgacaatttggttgaagtgagtgcgtttttggagaccttgcaaacgaagttggcagggctgcagtgtctatactgcgagaagatatttaagaccagcgctgtactgcgtaagcacatgcggaagaaaaaacatttcaaaatcaacccgcgtaacagaggatacgaccgtttctatatcataaattatctggagcctgggaagaactgggaggcatacgagaatgagagatatgagagtgatgaggagcggaaagaagagtaggtatggttttgcattaagggccggaactagaaactcatccctatgtctgtgtagagaatgggaagattggaacgagcctgataccacagaagatgcaacgatgtgtctttttgatgagtgcgtcttcccatcggcatttgacgcgtatgagcatatgaagaatgatcacaagtttgatttgagagaagttcgtcatgaattgggtaagttcccttggtggaaattaaatctacaataccggactaacatgtcgcaccgtcatttccttgcaaggactggacttttacgggtcaattaagctcattaactacatcagaaagcaaacttccctttgtcgatgttacgcttgtggcgccgaatttgaagacttgaccgagatgacggcgcatatgaaagccacccagcatttttcgcaattgcctgacaaagaggcagaattttggaccgatcctcagtgagtaacaaccagtttcggtcggtgccggcttattgccaaccataatttatacaggtacctgttccc

SEQ ID NO: 4538 - protein, 216 aa, Spizellomyces punctatus
MAKKERIAQKAAADVEKKTKQSAQKEAEEAAKWSDGAKDSKKKQLEEEKRQEALARKKEREAMLAAEEKELASIKAPVKGSAKKAAQRSERVEQYAADARADIPEYAASGIDAALDLMDVAATGAKGKSSDKIERHPEKRMKSAWAAFEEREMPILKAEQPGLRLSQYKQVLQKKWKKSPENPMNQQTISYDAARQEEREIIAQTAEKTLESMRVK

SEQ ID NO: 4539 - DNA, 638 bp, Spizellomyces punctatus
  source 1..638: mol_type = other DNA
gccaagggaaagtcctcggataaaatagaaaggcatccagaaaaaaggatgaagagtgcttgggccgcattcgaggtatgatacatatctgttgaatgaatgccaccaggtttctcaagtagcataactaggagagggagatgcctatcctaaaggcagagcaaccgggtctgcgactatcgcagtacaaacaagttcttcagaaaaaatggaaaaaatcgcccgaaaatccaatggttggttccctcatttatgttgccgttccgtgtcgtgcatcgactcacgacaatatggttcctacagaatcaacaaactatatcatatgatgccgcccggcaggaagaacgcgaaataattgcacagacggccgaaaagactttagaatcaatgcgcgttaaatgaacgtgaattgatgcatcatattcaaatcccagcattgacatcactatctttgactagtcgtaaataacccagcttttggagctagtaaaaataacatatgtagatattaagggtcaccgtatcgctgaggcatccgcgaatacgcaacattgtacaacggatctacgttggcgaggaacgcatcgatttgatgaatttcaacgactatgaacccctaaagtccttagttctctcat

SEQ ID NO: 4540 - DNA, 1790 bp, Spizellomyces punctatus
  source 1..1790: mol_type = other DNA
ctgttacgaaaatgatcctctcctcatgttcgacgtcacggaggacaatgaagacgaaagtgatccagacgtcgctgccggagaggaagagcttcgtaagatcgctatcgccgagcgggtaaaggcagaggaggctagcaagctagcggatgtattggatggtaatatctcaccgggggagtcagatgtgattttgttgggggtggatgaagtgaaagcaacacaaggcgtggacgaagaggttggtgcggaataaaggtagacggaggtgatagcaacaatgtgactcctgctggagtgccgcatctacctcatattgtcggggtcgggcggctcagcgcttttcaggactttagctacaagatatatctacaaacagtactgcagcatgtatttcatttatcatagactcatagaatttcatttttagtgtgcaggtggtagaaaatgtcactagggacaaattctccctccaacccactacagccggtctaatttacaattagccagcctgtccaacccttcataacctaccctgcaaacgagtcccacccctatcctaactcgctacaggttccagcctgggttgaactggggtacgtgcaaagcagcacgattccactaactaccactaggcccaattacacatgcgatacattacggttgttctaaccgggtaactaagcccaccacacgagagaaatcctactaagcccttgattccgaaattctgagtcggaggatgttttcagatactaaggtaaactagaataattagactgagaaaacgcgcatgggaaaaatcagcaagatatacctgcgatcgtagcagtatagtagtagcagcatttgcaaggggttatgttgtttttgtcgggagggcgaggtcctcgacaccagagcggcattctcatgattgatgagagttgggcagatgcttgtgagtcgaggatgggtaaagaggaaagagggaagagacagcaaaggccccccttttatagaccttccacatgcacctcactgcagtttaaaaaaaaaaaaaacattacatgcatgccacaccaatctgagcgatagagggggtgctgattatgcgatatgactaaccggattaatccggataataatgagttctagtggcacctccacactaagttgggtggagccacgatattgctctgcaatcaaaccggatgcagtcatacgaatcagttaaccgatcgttggctttccaagctgttcttccaatcgcaaccacaccggccatggcaaagaaagaacgcatagcgcaaaaggcagcagcagacgtggaaaaaaagaccaaacagtctgctcagaaggaagcggaagaggcagcgaaatggagtgacggagccaaagacagcaaaaagaagcaattggaagaagaaaagcgggtacgcaaggatcacaatatgtatctattagaaatagatacagtaccatatctctattgatcgtccttccattttagcaagaggctcttgccaggaagaaggagcggtaaagattatcttgacattatgtagaattggcgccgttttttcacgacaagccttatctctcaaactcactatagggaagccatgcttgccgcggaagaaaaggagctggcatcgataaaggcgcctgtcaagggatctgcaaagaaggctgctcagcgatcagaacgtgttgagcaatatgctgcagatgctcgagcggatattccagaatatgctgctagtggcatagatgccgctcttgatctgatggatgtcgcagcgacggga

SEQ ID NO: 4541 - DNA, 531 bp, Spizellomyces punctatus
  source 1..531: mol_type = other DNA
ttcgaaaagcctaatgcgaagcgcttcaaagatgaccatttcctgaatgagtcattatgactcatgtatccgaaggactgaactcgctgaagagctgagttttgtccaaaccatccacaccgagatcagcagcatcatggaggtccaaccgcgcgttaattcggtatgtctacagttggcgaaactcaggcccatctaacagctgatatctcggaatcacacaggctgtaatacctaaatgccaaggaagagttgtgagactggtgggcaagatgctggcggtatgtcgcagacaagttttcaattgtccagccttgatgagcctttgcacctgctggtggaccactgtgataacgattagcatatctttttcccattagatgaacccggccactggagaggctctgatcgaagcatgtgatcgaggacaggttacggtactggtatcacaggtctgtatgcgtgcagcatagatagtttggcaaaccgctatcatatgccaattgctcacatcatctgcgtgattaaaaa

SEQ ID NO: 4542 - DNA, 1258 bp, Spizellomyces punctatus
  source 1..1258: mol_type = other DNA
gcggatgagacggacaacgcagcggtaaaagagctgctggaaggcgatatatcaggtgaggacaatcccggactcgccgaccccgcaaagcttatccctaagactcggaaaagtgccagtgcccacgtacattattgctggtcgccatacccttccaaagcctgtgctcgaagccgtggagaacaatggcggggaaatttgtaacaacttggttttcttgggtaaaagcgactggatttggaggttttgaaggaaaagcactaaaagttggataccgctttcaggcaacagtggagtgatgaccacggttcagggattgaagatagcgtacttgagtggtacatacgatgcaaagtcttacccaagcggagtagatcaagcaccagatcagacagcgatgcactatacagagacgactgtccggtcattgagcagctcagggactggatccgtgcatggttctactggtgtcgatattttcattaccactgaatgggctgaggggattacccaaggatctgcggcagcctcaaaacttccagaaggaacagatccaagaagctcaaaacctgttgccgaccttgccgtggcattgcagccacgataccactttgcaggatcagcgggggtgttctttgagcgtgaaccatacagtaacaggggttcggctgggcatgtgactagattcatcgggcttggcgagtttggagccgcaaacaaacagcgggtacgtacacgagccgcaaatatcttcgaagcgcgaatgatctttcttatggtaatttgttgtagtggttctatgcaatgaacatcgtgccgttgtcccaaatggaaagctcgcagttgaatgtaaaacccccgaatacaaccacatgtccgttaccattcggcaatacatctaaaaagcgggcgctggatgaggtatggtccaatcctgcttacctcgcaaattatttaatgtttatggtgtcgaactattgcaatgccttttacaggttccggacagtttctttttcaataatgcgggagcgcggggaggccagaaacgacaggccaatggtcgacgtaagtatgcgaccgagcgcgacgcgagaaacaagtttctggtcttgctcatctatttatatttcagcaccaccacgtaaatacgtatgccatcgatgccagcagccaggccattggctggaggattgtcctgtcaatcctaaagaactcactcgaacgccgcctgaaaaatatgtctgtcgcttgtgcaatg

SEQ ID NO: 4543 - DNA, 1444 bp, Spizellomyces punctatus
  source 1..1444: mol_type = other DNA
gggatcatcactggcccagagtaccggatctgtagtggaagtaatagtaagttggcaattgtgattgacccatcctatgcaacatttttaactctgttggatagggacgagttcaaccgaattcggtgataggggagattaattcgacgcaatttgatgagaaatggggtaaggttgttttctgtctgactatgtcagttggttgtgaccccaggatttctctttgacagatcccgaagcatacaataagatggtcttggccactatggaatttgatcatatctttggatggtggaactaacggatgttctcggatcttgtatatcttgtaaaaaaatacacaatacagcttgcagtatcttagtgtgcaggtggcagaaaatgtcactagggacaaattctccctccaacccactacagccggttctaatttacaattagtcagtctgtccaacccttcataacctatcctgcaaacgagtcccacccgtatcctaactcgctacaggttccagcctgggttgaactggggtacgtgcaaagtagcacgattccactaactaactaccactaggcccaattacacatgcaatatattatggttgtttctaaccaggtaactaagcccaccaccacgagagaaaatcctactaggcctttgattccgaaattcttgagtcggaggatgttcagatactagtaaaatcagaataattagactggataatccgcatgggaaaagcccatcaagatgtacctgcgatcgtagcaatatagtagtagcagcgtttgcaagggtttgtgttgtatttgtcaggagggcgaggtcctcggcaccaccacatctgtattctcatgattcgaccgacagtcgcgatgagaagagttgcacagatgcttgcgagtcgaggatgggtaagaggaaagagggaagagacagcaaaaggccccccttttatagacctttgacatgcacctcaccgcagtttaaaaaaacattacatgccaatctgagcgatagatgggggttctgattatgcgatatgactaaccggattaatccggataataatgagttctagtgccattttcaatcacctccacactaaaatcagacgtaatcgcaggagcatacgatgcagttgtcatagcaacaagcatgacggagtgtcaatctcaagagatcttaacttctggaatttaagtacagtcgcatcatcctttggggtcgccggggtatgggacaatggcaaaacccgtgaaagcgcaagtttcaagccttagtttccaaggatttcgaagggcgtgctaattatgttgtacttttagtctggttattggagcgttgaacggaaacttcaagcaagctttgataaagattaatggaattaacgctaagcacggcccctttgacctgcttctttgtgtgggggatttctttggt

SEQ ID NO: 4544 - DNA, 821 bp, Spizellomyces punctatus
  variation 538: note = n is a, c, g, or t
  variation 666: note = n is a, c, g, or t
  variation 819: note = n is a, c, g, or t
  variation 751: note = n is a, c, g, or t
  variation 709: note = n is a, c, g, or t
  variation 658: note = n is a, c, g, or t
  variation 634: note = n is a, c, g, or t
  variation 698: note = n is a, c, g, or t
  variation 607: note = n is a, c, g, or t
  variation 642: note = n is a, c, g, or t
  variation 813: note = n is a, c, g, or t
  variation 650: note = n is a, c, g, or t
  variation 561: note = n is a, c, g, or t
  variation 603: note = n is a, c, g, or t
  source 1..821: mol_type = other DNA
  variation 655: note = n is a, c, g, or t
accaggtgagcagtagcagatgcttgaagtatcagggagctcggagcaaccttgaatctcacggtgtgaggaagaccgtgcttgactcgttgctcgacctccgctgcgtccaagtgccgacagtgctgatcgtaaccaatgatgcgcccagtgcgcttggccatttggcgaaccttatcaagacgttcagatgtgcaaaagcagcgatatgcatgtccctcctgatcgtgtttacgtgagctacgcgtagcttgcctctgtaagcagatgttttctacctttagcaatcgatctgccttttcttgatacaacgccgtcctttctgactgcaaagtggaatgtctcaaaaagggacgctatgaaacatttgacatggggatatcacacttgtaaattacctgaatgtatggccccaccttgccaccgacggtggggccttcatcgaaggtaagtcctgcccaatcgagcatctttataagatgatttacagctccatcgaccgtacgagcctatactgaagccagccccgtgrgrgarnsagttrayatvvddkhshcscsnarrcskcthycstcrkdwthrscacrrarrtaracrwvrkynsdanashsdyskktamaartgscsmdcrscnssvsdgvngvgvvsvnhscsnaangratraknvdcsymaryvrrkktydcrccrydtadrttyncvssgcagddnatcsvhgrsadaktdvtkaryrkaasddrastgacrskmhansmrtrrvdsrrwaykvshddayayhhssvaymtykawchgddcaksavvshgdgatkakasncrrgsntg

SEQ ID NO: 4545 - protein, 479 aa, Spizellomyces punctatus
MDTAISTQQALREQHLVGKQVKGAKHLLEVEETSERGRGIFARENLSAGTTLLEERAYATVVDDKHLQSHCSLCFSPNARFRCSKCTLLHYCSQTCQRKDWTLHRSECACFRRIAPRRPPTAIRALCRLLWVRQKYPNSFDAINALQSHSLDYSKEKLETFAQMAALIRTIIGEESCLPPSEMIDLLCRFSCNSISVSDGELVNIGVGVFPVLSLVNHSCSPNAAIIFNGERATLRAIKNIQVDEEICQSYMEIAEPRYVRRKELKETYFFDCRCPLCLRYDQTADPRTTYNCVSSGCAGFIDLPDQLENATCSVHGRLSADLEAKLTDEVTKAFRLYRKAAEESDPDRALSTGLACLRLQSKLMHPANSEMIRTRRLVLDLLLSRQRWEEAYKVSHDLLDAYQALYEQHHPSISVQAYMTYKLAEWCHGDDIQLLCAKISEAVQLLLVSHGDGQALTKEAKQASENCIIRRGSLNTFG

SEQ ID NO: 4546 - DNA, 1673 bp, Spizellomyces punctatus
  source 1..1673: mol_type = other DNA
tatagttgacgaactaaacgatcagggacgacgctactggaggagcgggcttatgccactgttgtggatgacaaacatctccaatcgcactgcagtttgtgctttagtccgaacgcgcggtttcgatgttcaaagtgtaccctattacattactgttctcaggtatttggtccaacccctcagcctccgcactaataactgactcagcgaaccatggcagacgtgccagcggaaagactggacactgcatcgaagtgaatgcgcttgcttccgaagaattgcgccccgaagacccccaactgctatacgcgcactctgtcggttgttgtgggtgaggcaaaaataccccaattctgtgagtttctggagcaatgttcgggtgcattcaaagtgctaacagctgttgaaagtttgatgccataaatgcattacagtcacgtaagtgtgctcattatccaatacagtcgaggcatgttcctcaaagatggttcaaagacagcttagattactccaaagagaagctggagacttttgcccaaatggccgctctaattcggacaataataggagaagaatcttgtttgccacccagcgaaatgatcgatctgctgtgtcgggtaaggattgtgttcattagcatcaatgtgcagctttgcatctctatgcagcccacaaacgaagatctctatttctcaatcactgctcccaactaatcaacatctaccgcagttcagctgcaacagtatctcggtgtcagacggggaactagtcaacattggggttggggttttcccagttctgtcgcttgtcaaccactcctgttcccccaatgccgccatcatttttaacggcgaaagggccacattgcgagctattaaaaacattcaagttgatgaggaggtatgcaaagaagcaagtgaagtattgagagtgtccggcttgacctgatggactgctgaagatctgccaaagttacatggaaattgctgagccacgatacgtgcgccgaaaagagctgaaagagacctattttttcgattgtcgctgccctctgtgtctgcgatatgaccaggtaagggtaaatgccgtgctgtgcggtgcatcacctctgatgctgacctgtgcatgcaaaagacagcggaccctcgaacaacctataattgtgtaagctccggttgtgccggattcatcgatttacctggtcagtgtttacatctatgctaccttcgcttacttcaagtaattgctaatacgaatactgcctttagatcaattggagaatgccacatgctcggtacacggtcgtctctccgctgaccttgaggcaaagctcaccgatgaggtcaccaaagcattccgtctttaccggaaagccgcagaggagtcaggtatttctgctggacttagtatccctgcataccttattgagcgttttcttagacccggatcgcgccctctcaaccggtctggcttgtttgagacttcaatcaaaactaatgcatccggcgaactcggagatgattcgcacgcgtcgcctggttcttgatctcctgttgtcccgccagagatgggaagaggcttacaaagtgtctcatgacctattggatgcctatcaagcgctttacgagcaacaccatccttctatttctgttcaggcgtacatgacatataag

SEQ ID NO: 4547 - DNA, 1444 bp, Spizellomyces punctatus
  source 1..1444: mol_type = other DNA
tcagccagtgctccaaccgtcgagcaacagaaaagtggcaagcatatcgacctggtccgtgtcctccactctcagaataaggctgccaccagtttggcgtgccagaagatagttgaagagagccgtccgtaaacctcctaggtgaagatatcctgtaggactgggggcaaagcgcactcgggcaggagcttgttcggcatggttcacttttgtgctaaaagctgcgattcggatacagagtcgtagtgtggacgccggactatatgcaaaactaaaaaggccgatatgcgaacgcccagatattcgttgcagaaccattttgcaccaggttgacagtggagatctcattcgcgaagtatcttagtgtgcaggtggtagaaaatgtcactagggacaaattctccctccaacccactacagccggttctaatttacaattagccagcctgtccaacccttcataacctatcctgcaaacgagtcccacccctctcctaactcgctacaggttccagcctgggttgaactggggtacgtgcaaactaccactaggcccaattacacatgcgataacggttggtcaaccgggtaactaagcccaccaccacgagagaaatcctactaagcccttgattccgaaattctttagtcggaggatgttcagatactagtaaaatcagaataattagactggataatccgcatgggaaaatacaaagataatgcatatctgcgatcgtagcaatatagtagtagcagcgtttgcaaggggttatgttgttgttgtagtcgggtgggcgaggtcctcagcaccaccacatctgtattctcatgattcgaccgacagtcgtgatgagaagagttgcacagatgcttgtgagtcgaggatgggtaaagaggaaaggggaaagagacagaaggtcccccttttataaccatttggcatgcgcctcaccgcagtttaaaaaaaaaacattacatgcatgccatttgagcgatagatgggggtgctgattattcgatatgattaaccagaataatccagataataatgagttctagtgccattttcaatcacctccacactaaattccgacctctgacacgtgatcttgtcccacgaaagaatagtgcatcgttggctgccatgtacctcctacacaatgctcaactgcacaggtatggtcttgattttttgaatgggccttgtgactccctttaaaaaagggcaagctcaactttatacttgtgttgctctcgtagatatggataccgctataagcacacaacaagccctccgcgaacagcatcttgtcggaaagcaggtgaaaggggccaaacatctcctagaagtagaagaaacctctgagcgcggaagagggatttttgcaagagaaaacctatccgcgggtatgaaaaacgtcgcgatcggagtctagaaaga

SEQ ID NO: 4548 - DNA, 780 bp, Spizellomyces punctatus
  source 1..780: mol_type = other DNA
ccaggcgctaaacaattttgatttgttgtacagtgagcaccagcgcacgacctatgggattcagtggcggtatgcaaccacaaatgtcaccagctatgagcggaacgggactccccagcccagccctgtccttgtcttcaaacaactcgggtttccatggcatgtcgggcatgtcgggggctattccttcagggacctctacacccaacagtttcgggagcaatccaggcactccaagcatgaactttctgcaaggtgttgctcgcggacctacctctgcgccaaatgcaggggctatgcaatttggaggggggcccgcttttcagcagccgcagcagcagcagctgccgacgatgccaagtagtatgccgggtatgagcggtgtcaacatgggcggttttcaaggaatgcgcccgatgggagggatggctccgatgggcacaaatatgtcaaatatgggaggcatgggaccgatgcaaggaatgtcaaatggaatgggtggaatgggtggatttgccccaaatggtatgggcggaatgaacatgaatacgatgccaggtggtatgggtggaatgaatgggatgccgaatggaatgccgaatggaatgccgaatggtatgcaaaatggtatgcaaaatggtatggggccgaatggtatggggtcgatgggagggatggggatgggagcaatgggaggtatgggcatgaacaacatggggcagcaaggttttaggtagcagagtgtgacatagatccttatatttagacaggatggtttct

SEQ ID NO: 4549 - protein, 283 aa, Spizellomyces punctatus
MSRPEHTAPPEIFYNETEASKYTNNSRIVSIQNEMSYRALELLALPEGEPAFVLDIGCGSGLSGEVLDEEGHFWVGLDISDSMLEVAKEREVDGDLFLQDIGQGLGYRPGTFDGAISISVLQWLCNADKTVNNPRARLKRFFSTLYSALARGARAIFQFYPENPDQIEMIISSAMRAGFTGGLVVDFPNSAKAKKYYLCLFAGFKDNAGSSPALPKALGEGDETPGHITYGSNRIRERRKGKEQRKPVKDKNWVLRKKELNRTRGKEVPADSKYTARKRKIKF

SEQ ID NO: 4550 - DNA, 1525 bp, Spizellomyces punctatus
  source 1..1525: mol_type = other DNA
gctctcttattcagcgcattttgctaacatttccgcaaaacagctcacgaatagtctccattcaaaatgaaatgtcttaccgagcgctcgagctgctggctcttccagaaggagagccagcgtttgtactggatattggttgtgggtctggtttgagtggagaggttttggatgaagaaggccatttttgggtcggtctggatatcagcgattccatgctggaggtggccaaagagcgggaagtggacggagacctgtttctgcaagatattggtcaaggattgggatatcgacctggaacatttgatggagcaatcaggtaagaatgatgcccgcgtggattgcacattgttgaagcgggcctgatcgcactgtctcgcctagtatatccgttctacaatggctctgcaatgcggacaagaccgtcaataacccccgtgctcgcctgaagcgtttctttagcaccctctattcagccctagctcgtggtgcgagagcgatatttcagttctacccagaaaatcctgaccagatcgaaatgatcatatccagcgccatgcgtgccggtttcacaggtggactggtggtcgattttcccaactctgccaaagcaaaaaaatactatttgtgcctatttgccggattcaaagacaatgctggttctagtcccgcattgcccaaagccctcggagagggcgatgagacacctggacatatcacatatggttcaaataggtaccaataactttgcttgtttcattccatgatgtttgaatgctaagatttcgtcgtaggatacgggagcggcgaaaaggaaaagagcagcgaaaaccggtcaaggataaaaactgggtcttgcgcaagaaggaactcaacaggacaagagggaaggaagtgccagcggactccaaatacacagcacgtaaaagaaaaatcaaattttgatgtattttttaagaataagtattatttatgattaggcatccgttcccaaacgtcgttccaacaacctccatcaaactcttaatggttatatacaaaatgttgagcgcacaagctgagccattcgctgcctatcgtgaggcttgtgatctgctcaggattgctttggcaccttcgacgatcaatcggtgttcaactttatgtatccgatcttctaatgtttccaaagtgtcttctggcaaaataggaatcctttcctgcagaacgacctcgccccgatcgacttccggtataactttatgcaccatcacacccgtttcctgtatctttccctctttatatgcactaaatgcacgctcgatcgcatgcgcaccgtcgaatgctcccgggagagcaggatgcagattgatgatttgccccggagggaactgttgcaagaaatctggtgacagaatatgcatccatcccgcaaggacaataaggtctggtgtatcaacagcggtcgtcccatttgacgagcggtccgcttccgatcgcgactgtgcgagccagttctttatcctggcggccacatccaaatcaa

SEQ ID NO: 4551 - DNA, 1681 bp, Spizellomyces punctatus
  source 1..1681: mol_type = other DNA
ttttgaagaaattattgaacattttcgggattttaaattcaaatcttgacgaccatggcaagacatgcagctgccatgaaggactttcatcattctgaatgtattgggtcttgccatacgacgcacagatactaccatatattgctgccatgcattgctgccatcccgcatcaagcaccgtaaaacaaagctgttttattcatcttggcacaatttcgcagatgctgaatgggatgaaaaaagattgtcgggacccgtcggagcgtgatcgtctccttcgccggagcgtcgacatcacttcctaatgagcccccgttttgttcttgagtacgtagggaaccaagttccctctggcaatgttacgctatcttttccacagcagtaacactgtggctgcactcgattgctttttaaagaagaaaaactggaaatcgcaagaattcaacgctcttttatagtcaatagttgccatggtaatgctaaagccaatgggaaccttttcacgtgtcgtggcgcgcgatcaagcttagtgtggaggtgattgaaaatggcactaggacccattattatccggattaatccagttaatcatatcgcataatcagcacccccatctatcgctcagattggtgtggcatgcatgtaatgtttttttttttaaactgcggtgaggcacatgccaaaggtctataaaagggggaccttccctctttcctctttacccatcctcgactcgcaaagcatctgcccaacacatctcagtccatcatgagaatgccgctctggtgtcgaggacctcgcccacccgacaacaaaaacaacataaccccttgcaaacgctgctactactatattgctacgatcgcaggtatgcattatctttgtattttcctatgcgtattccgagtctaattctggtttaattagtatctgaactaaagaatttcggaatcaagggcttagtaggatttctctcgtggtggtgggcttagttacccagttagaaacaaccgtaatgtattgcatgtgtaattgggcctagtggtagttagcttttcacgtaccccagttcaacccaggctggaacctgtagccagttaggataggggtgggactcgtttgcaggataggttatgaagggttggacaggctggctaattgtacattagaaccggctgtagcgagttaggaaggagaatttgtccctagtgacattttctaccacctgcacactatgaagaacgctgtttgaacgtaaataaacgcctgcaggatgaaaggttctgatggaatgtggaatgtgcgtcgtcttgcctttatatttttgaaggtttgggcatcgggaattgccatggaatgacataaaagtaccagtttgttgtccaagaaagtatatccatcttcagcactttttaatggaactgacataatctggcttgttgacatggcaacaggtgaattgtttttgaatttcgcgtagcaaatgctgacgagctactccaacaaccaccattattagcaccaaacatgtcaagaccagaacacacagcaccaccagaaatagtgagcttgtaaacattctattgcttccaatttggtagtcttactcacctgggatattagttctacaatgagactgaagcctcaaaatatacaaacaagtaggttttgtcctcacgtt

SEQ ID NO: 4552 - DNA, 780 bp, Spizellomyces punctatus
  source 1..780: mol_type = other DNA
tgcaaacaccaaagcatcacgctcttccatgaaaaaacctgcctgtagtggtagttccagccaggagtaaagcaaccatttagcctagattcgcaaggaaacaagaaatgccgtgcatacttcttgacgggtcagcaagtctgtcttcttcagtatcttcatggcataaacctttcttgttggcttatacttcaccagacaaacctacaatagatccacactcgcctcaagttgtattgtaatgccgtagccagaaaaacgttacccttccaacagcgcctgtggccagcgttttcacaatatcaaaatcagcggtgtttattcgtagcgcttgtagtctcgtcattagcttctcatctgcaatttcggcgatggtcaaaacatttcaacctccttgaattagtcaataacaattcaccaacatttgtgaacaaaagcagccatgtgcccagtttgactgctagctgctgttttgcagtcggtatagactgcaaggaaaaagtccagcaaggcctcgagggaaagtgacggagctgcgagttcattggataggacctgcgatatctggtccagccgaggcctgacgtgggaagcaaactctgctgaagccatgtctgttggccgtcttgaacccctctccaatattcgtatagcttatacaggtcaaaagggccggtgaaactaaaaacagcgaaaacgtctgatcggtgttttcagacccgcgcggtgttgttgctgatataatcatggcacgtgtcctgcctcatatcacgcccgatg

SEQ ID NO: 4553 - DNA, 1557 bp, Spizellomyces punctatus
  source 1..1557: mol_type = other DNA
gatcatcgacgaagaaatccaacgtgtaggtatgctggcacatccaatggactaacatcaaggtgattcatctgctcataaatgaggtttgcgcaggtggtcaaaagctatctttgccatgtctcctcccatccgatggttggaagaaaacgggacgctgggaatcaactggttctgaggtacgctgctagctcccctctacctggatctgaaaatagatatgtataccgtgctatagatgtttaaggttaccgatcggaaaggaggcgagttttgcttagcaccaactcacgaggaagagatcacgcagctagtcgctgcagaggtttcctcatggaaacaactaccgcttcgcctataccaaacaggtgaatagtctggaatcgatatgtaatactgtagcccatattcatatcgaaacatgtaggacgtaaatatcgcgatgaagcacggccaaggtcggggctgcttcgtgcccgggaattcatcatgaaagacctttactctttcgatgcaactgaagaagctgccttagcaacctatgatgaactaaggaatgcttacgaccgaatattgaaaaggattggcataccgtttgctgctgcagaagctgatagcggaaatattggaggaacgaggtctcacgagtaccattttctatcaactggtgggtttgctgtgagggatagcgtttctgtcaagctgaaggctgatgactacgggcagttggcgaagatacacttttgacctgcaacaattgcgggtataccgcgaatgaagaaagagcagtgggaatcctaaggccaccgcagaatgacgacatgaccacggaggaactacgattcagcttcggaagacaggatcagagcgaatggtgcaatgctagtgttacggtaccaaatggtcgcacgctgaatcccgcaaagcttaaagcacatccagccctgaaaggattagtcgtcaaattcaataatccaacggagtcaaatgcctttcccaacgaaacgaaattcattgatcacagagttcgaagaagggaaactgcattggatgactctcggacgcatattggagacttcaccatgatccaacatggtgatgggtgttccgtttgcaacagtgcatctcaacaccatgattcgcagccatctcaattcctccaatcccatcgggcgatagagatcggtcacacctttttcttgggtacaaaatattcagcctccctaggtgcgacattcaaaaacgagaagcaagaggttgttccgatgcaaatgggctgcttcggcataggcgtgactaggatgatggccgcggtggttgaggccagccatgatcagcatggcattatttggccagagtctattgccccatatcgcatatgcatcgttccaatgttaaacaagaagagcgcgctagaacaacagcgggccatatcaggtgccattgagcaactttacagccttttaaaggatgcagctgggcaggaggatattgttgttgacgatcgagaagatatgaccctcggattcaaaatgaaggatgcctcgctgattgggt

SEQ ID NO: 4554 - DNA, 1681 bp, Spizellomyces punctatus
  source 1..1681: mol_type = other DNA
tttaaggccatcagcgtttttcaatggcaagatacggggcatcttacgctttatccatacttggaagacgctggataaacgttggccttgtctctgagccatgatgatgttgtcgtaattagaggaagatacgcaagaaactggttttatatgttcaatcttatccgtgagatgaagtccagttcacctcatttgcatcatcgccgtagcgaatgcattgttactgaattgacgactatcgcagtctactttgatgaagatggactgtttccaaccagttttgacttgaaatgtctcccgtacctgggttagcctttaattgcttttcactatatcatgaagttcttccttttatatatggtgatttatactactatggatgttgaagtacctacgactgtgagacccttgaaggacaagcgcaatatccatctagtttcactggaaggtttacttacctccatgtcccatcaaacccgttgatacttaatgtccttggtgaagccacgtgattcggatgttcaaattagtatggaggtgattgaaaatggcactaggacccattattatccggattaatccggttaatcatatcgcataatcagaacccccatctattgctcaaaacggtgtggtatgcatgtaatgttttttcttttaaactgcggtgaggcacatgccaaaggtctataaaaggggggccttcactgtctcttccccttcctcaccagttcctcgactcaaatcatctgcgcaactctcaagcaactcgcaagtccaatcatgagaatgcagatgtggtggtgccgaggacctccacccaacaacgacaacaacataaccccttacaaacactactactatgctgctacgatcgcaggtatgcattatctttgtattttcccacgcgtattccgaagtctaattattctgctttcacttagtatctgaacatcctccgacgcttcggaatcaaagggcttagtaggatttctctcgtggtggtgggcctagttacccggttgaccaaccgttatcgcatgtgtaatggggcctagtggtagttagttagtggaatcgtgctgctttgcacgtaccccagttcaacccaggctggaacctgtagcgagttaggataggggtgggactcgtttgcaggataggttatgaagggttggacaggctggctaattgtaacttagaaccggctgtagtgggttggagggagaatttgtccctagtgacattttctaccacctgcacactaagatcagcgcttttccaacgatctagcgcatcatgtttcgacccatcctgccagcatgtcgtgctccacctataccagtcatgggctgctgtcgccggcatgcggtaagatatctcatatttgcacttttagtggatattgctttgatacctcgtagactttggctggccctcaccaaaatagaatgtccaggatgctcgcaccaacctctaaagctgtacacgctgcggataatgcacattctgcagttagtcacaatcttctgttaagggcaggatacataaggcaggtaggtctccacggcttcttggggaatggttaattgccatccactaatagtttagtgccaaagtcttcggccggaatgtacagttttttgccgctcgccctacgtgttcttggaaaaatagaaag

SEQ ID NO: 4555 - DNA, 462 bp, Spizellomyces punctatus
  source 1..462: mol_type = other DNA
cactgcaaggccacgtttgtgggaacacgtccaactgtcacacatcatagctttgactcacctcgctgaaagaagacaaggttgacttcgtccgtatgttgcacgtcaaaggtatttgtgcgcactagagccaacacttggcagggaagcgaggcaggtggaaaagggacagcaggtctcttgctggtgttgtaacgacggacaaggcgctgactttgttcgtgtgcgttatgtaaacagagcaactggcccgaccggggcgtaacgggtggagatgatccccaaaggctgaatcggttgcgggccccgattcactatgcaaattccacagagcggtagatgggaggaaaaagatagactatactattattgtttggcttatttgatttgctccctttgttgatggaaaaacgcgtgtccctcaaaaacgacgtaacagagcagaaggccgaaagcaaaata

SEQ ID NO: 4556 - DNA, 788 bp, Spizellomyces punctatus
  source 1..788: mol_type = other DNA
caaattcaaggtgtgctccccataccgtatccattgacgtatctaaagcacaaagaggcggtacggggagacaacggcggagcacgctgaaggcgcacaggatcgcaccgcagccatgctctttctacatatgctcttcattgcataccaaatccatgaagatggtggtggtagtaccgctttggtaaagttcattcataaagccacatcacctgcccttgtgcaagtatctgtgcacaaattgtgcctctgttggagggccgtctctccctggcggcagctatagcttctatgaacaaaacgtgagctttccaagcgtgacagattagtggtcactgtgagataactttcttccagtccctcaaccacccggttgggaagcaagcctcgagctcgtgaaatctcgtgcggtctacgcttccgtcggttccttccgagaccttggttaaacgccctttaatggtaggtggcagttcatgaaattgttgcacagcagggagacaaaaaccagacggaactttgaacccagacaactcaacccagaggagcattgccttcgaaaacaacaaagtagtgatgtcgcccatatttcttccatgcttgcatatgctgtcaaagttaaagatgttgtccaaaaagtctctcgtatgaacacacaaggttgcaaacatcaccataatgagacaatgtcgattgacatcaaaataaggcttttgcgactagcagggtaatgattacgatatgggtattacagcatcccctgaccttattgaaggacctcagccaaa

SEQ ID NO: 4557 - DNA, 1444 bp, Spizellomyces punctatus
  source 1..1444: mol_type = other DNA
cgcggactagcagcaggagcaagaagagccaacgacacaaaaagactgagaggtgcgagatatggccctttttgagatcgatcaggtcctcgtatggcaaaaaggaatggaagtaatagaagcagccgtgcttattgaatcaagcgataaataagcgaggagagaaaaaagggatattttccaaacgtaatatcgagaagaaagaagccaacgacgacgacgacgacagccaaaaagtcaaagacgtcaaaacgcatctgcaaacagaaggaacccaaagaacacttcggagggaaacttgtaaattacttcaaacctcccgcgtacttgtgttgggtcatgggatataaccttatctggtaacattacagtcacatgaatcagaattcattaattaaagcgcctagacgcccaatggaacgtcatttaatagtgtgcaggtggtagaaattgtcactagagacaaattctccctccagcccactacagccggttctaatttacaattagccagcctgtccaacccttcataacctatcctgcaaacgagtcccacccctatcctaactcgctacaggttccagcctgggttgaactggggtatgtgaaaagctaactactactaggcccaatgacacatgcaatacattacggttgttctaaccgggtaactaagcccaccacatgagaggaatcctactaagcccttgattccgaaattctttagtcagaggatgttcagatactaaggtagatcagaataattagactgggaatacacgtgggaaaatacaaagataatgcatacctgcgatcgtagtaatatagtagtagcagcgtttgcaaggggttatgttgtatttgccagcaggattctcatgatggacttgagagttgagcgttggcagatgcttgtgttgtgagtcgcggatgggtaaagaggaaagagggaaggccccccttttatagacctttggcatgcaccacatcgcagtttaaaaaaaaaacattacatgcatgccacaccgctttaagtgatagatgggggcgctgattatgcgatatgattaaccggattaatccggataataatgggtcctagtgccattttcaatcacctccacactaagaataagatgtttatgtaatagattacataatatcaagttcgactctcgccggtcacactccggggatcccagttcacactagcggtttttattgccctggtacgtgagtctacagtccttgtggcctttttattacactgatttggcagcaggagtagcccgttatggcattaagtttactctgcaccgctttctttggtatttgctgccaaatcttgtcagcttgttttccctcttgccactttacagggtgcctgttgccaaatatcgatggtttgccagactgcttgtctatacgaacttccgcactgctg

SEQ ID NO: 4558 - DNA, 556 bp, Spizellomyces punctatus
  source 1..556: mol_type = other DNA
caggtgcccgtagtcctactttgcaccgtatgcggtcattcccggcttgggaacgacagacacctacaacgacaacaggagatcggaaagctttcgtagataggatgagacagtatgaaagcgagttttcaccaactaatggccgcggttgcacccagttatcaccagatagtccctttgcgaagcatacaatgcccgatataatcggttccccctcaacctttaaatcgagtcctgacctcaaatccacaaatggtcgtttggaggacaatcgttcatctcgccgagcgtcaattgccagcacttcagagtccccattaattcatagagagttgcaaagtaccgctgacacgaagaaagagccgtcagttgattatttggagttgcgacataagctctcagaagatctcaagtctttgatggatcacaaggtaacttacttcggccacctgaacgatgtgcctcggcgctaacacaaaattctttccttttgtttccatggaatcaggccaaggtaagcaacttgtgaccatgatagcgtccaatggaaattgac

SEQ ID NO: 4559 - protein, 337 aa, Spizellomyces punctatus
MINDVGNEIFSHFAFMSVHFKAGWLGQGSNCTQPDQHELGWSNVAIASSLIVVNGVVSVLFGLGLEKTLIISATRCLVQLTIMGYVLKPVFEHNDPLFVFALALTLILISTVEIVYNKSKHRHDYMFATVLAAMLFSVTLTSFIGNAFAIQADPWWLPRTYIPTLGMLLGNSMSGMALGLSSVLGQAADNKDRIELYLSFGASRWEAARPVCAEAIKTALLPVLNNMSVMGLISIPGMMTGQILGGAKIADAVRYQQIIMFMISASCAIATVMAVLSCVFIIFDDHSRLRMDRILKDAKKRKTATRFWTNVMKRFKGRNQVDHANGQNGSEAEALLR

SEQ ID NO: 4560 - DNA, 1065 bp, Spizellomyces punctatus
  source 1..1065: mol_type = other DNA
acctttaagtcggaacactaattttgcacatccaatgaagatgtctggtccaactgactataatgggatatgttctgaagcctgtgtttgagcacaatgatcccctctttgttttcgcccttgcctgtatgtccgttgctctttgacctcttgatttgatatattactgacctagtaccttctgggtcacagtaacccttatcttaatatccacagtggaggtgcagagagctgcaagcgtgctttaaggaagtgaatcccgtaacgctcaacagttgcaatagattgtgtacaacaaaagcaagcatcgacacgactacatgtttgctaccgtattggctgccatgttgtttagtgtcactttaacctcttttattggttggtatgaggctcacagttatactgagtttctgccacatgagctgattttcttcattttggtaggcaatgcctttgcaatccaggctgacccttggtggctgccacgcacatatattccaactctgggcatgctgttggggaactctagtaagctgaaatccgcctctaccctgttgccttcctcacttcttcccgtctcatcgtattatgtatagtgtccggcatggccttgggactgagcagcgtgttgggacaggctgccgataataaagaccggatagagctttatctttcatttggggcgtctcgatgggaagcaggtacttctggagagccgatcaacggtttcggtttcgttcatactgactgggaacatagctcgacctgtctgtgcagaggcaataaaaacggccttgctaccagtgttaaacaacatgaggtgcggattcatcgcggtcattgaacatacccctttctgctgacaagtcacggttcttagcgtaatggggttaatctcgataccagggtatgtggaaagacagtcgcactgagagttgatggcatttggttcattcgtcctccaattcatttagaatgatgacagggcaaatactgggtaagttgaactgttctagtagtaagggataacgaaccttacccttaaaatctgtaggtggggccaaa

SEQ ID NO: 4561 - DNA, 1612 bp, Spizellomyces punctatus
  source 1..1612: mol_type = other DNA
gtcatccatatctcgttcctagctgacatccgaaatgagccgcattcctgccagcggtggtcttggccgtgttcgccgacgtaaggaagagttggatacccagttagatgaggtcgacgggcagatcggcactgtgaagagaaggatgcgagaaatgggaatgctttagattttaatagtaataaccgtttggcttagtgcaacatcgattgcatcttgcatccaatttcaacgaaagtaaatggaattgtggcgggggagccggttagtctcatgattgcttgcttcgggagagtcgagaataaataacaagcgggggaagagcgagaatgaggatttatatagaaaatcgagtgcagctgcagaacaatccaggcgtctttcattgatatcgcattaacttgtacaggaaactcacatttgtagtttccacaccgctatgtagaaacatgattacctaagctgcttatcctccacgatctgggatggtgttacacaagattagtgtggaggtgattgaaaatggcactaggacccattattatccggattaatccagttaatcatatcgcataatcagcacccccatctatcgctcaaaacggtgaggcatgtttttttttaaactgcggtgaggtgcatgccaaaggtctataaaaggggaaccttctgtctctttcccctttcctctttacccatccttgactcacaagcatctgccaatgctcaactctcaagtccatcatgagaatcctgctctggtgccaaggacctcatccgcctgacaaatacaacataacccctcacaaacactgctactactatattgctacaatcacaggtatgcattatctttgtattttcccatgtgtattccgagtctaattctggtttaattagtatctgaacatcctccgactaaagaatttcggaatcaagggcttagtaggatttctctcgtgtggtgggcttagttacccggttagaacaaccataatgtattgcatgtgtaattgggcctagtggtagttagttagtggaatcgtgctgctttgcacataccccagttcaacccaggctggaacctgtagcgagttaggataggggtgggactcgtttgcaggataggttatgcagggttggacaggctggctaattgtaaattagaaccggctgtagtgggttggagggagaatttgtccctagtgacattttctaccacctgcacactatgatatgatcaatgacgttggtaacgagatcttctcccactttgcattcatgtctgtacatttcaaagctggatggttgggacaaggctccaattgtacacagccagatcagcatgagctagtaagtcgaatatgggctttatcttatcggaaagaccgctgagttgtggtggccagggttggagcaatgttgccattgcgtcgagtctaatagtggtaaatggtatgaatgtatttatatatgtactgctatgggcagacgcactgagcaaacatgtaacttaggtgtcgtgtccgtgctattcgggctgggactggaaaaaacattaataatttcggcgacaaggtttgccttttactagcgccaaagcttatttact

SEQ ID NO: 4562 - DNA, 1236 bp, Spizellomyces punctatus
  source 1..1236: mol_type = other DNA
gaaaggcgacaccaaccgaacgacgtgtgttctgacaagcttgtagcgcggattcagggctttctagaaccactttggtcttgtcaatatgttaataattcgctaactttttcaatttaccatcccatgacatttccgatgaaatcaatcagctaattccaacagtcaccacttgaacaaatattctgtctttaaaacacgtgttggatcattagtactgtatagcgccgacaaatcagatgtgtttatcgcgccccaaacaagtccactggcaaagactatcgaacaagtcaacaaatgaaagggcagatgagaatatgatgactacgtcacttttgaagtccatgggctgaaaatgacattctattcagatacaatacaagggctggcgaaagaactattatgctgccacattagttgagcttggttggtatgtacccaatggcatttcttttcattctgtcattcatctcgctgacatgcagtctttttagtctccaagccttgtcactgaacatcctctggcttgtgacgctgcccagtcgattcgctcctggatgcaagagtctggcttgaatgctccggatcaaggcccagtagggaccgtgtggtggtgggcaattatccggttagaaccaaccgttacgtattgcgtgtataactgcctacaagtagttagttagcttttccggaccggttgtcgccggtttatccctggtgtagtagctagtgccagtttctgtcacctctacactaagacaactacctaagaaagtgttttgacaagcttgcagggctttctagaaccgttttgctcttgtcgataggttaatagctcgcctagttattcaagttactgtcccatgacaatctcgatgaaatcgatcaattaattccaacagtccccttccccccatcttgtttctttatccctcgatgcaagcatctgcccaatgctcaagcactctctcaagtccatcatgagaattctgctctggtgccgaggacctcatccacctgacaacagtgatcagaaccagctgcaaccaattggataggttgacaaagctgctattatgctgccacatttgttgagcttggttggtatataccaacagcatttcttttcattctgtcattctgtcactgacatgcagtttttttagtctccaagcacttgtcactgaagattctctggcttgtgacactgcccagtcgattcgctcctggatgcaa

SEQ ID NO: 4563 - protein, 465 aa, Spizellomyces punctatus
MPDSPKDDKNHNGDASLDSQEQLVPRFHSSKQAKRKLNILLTNGRFPVSLDLARQLKASGHKVYVVDPMKYHVCKFSRAVKKSWHVPAPHVDPAGYVKGVKKAIVEANIDLIVPLHEEVFHVTQICKGNPEIIGKLFAPSFDMLICLHNKWYFHKILRRFNLDAPETWLCRSVEDVQNLDRSSDLALKPVFGRAKSNLYHLKANHPLPDNILIGPDNHYVAQVWIYGKQFCTYSVARDGKMLALAIYPVQDTVDGSSCVYFKSIDHPGIRSYVEVLIQKLGYTGQIALDFIETDSRLVAIECNPRATSGIHLFKQNEGLVNALTSAVDTSSPLESFSFTLAKIGAKRQLFPGMVMWQHEGVSLKQYLRHLAKLTTTRDVIFSWRDPMPSLMQPFLLTSYYEICRERKMKLGEMFQWDLTWEPKGEELRQVEREMEVWDAEGGAARTGGLQGDGNQAISMDGATLP

SEQ ID NO: 4564 - DNA, 1548 bp, Spizellomyces punctatus
  source 1..1548: mol_type = other DNA
attttgcgagatggcgaagatactgcttcagagacactccttcgtgctgccacattaccatgccgggaaatagctggcgttttgctccaattttggccagcgtaaatgaaaatgattccaacggagaactggtatccactgcactggtgagcgcgtttacaagcccctcgttttgcttaaagagatggatgccagacgtggcgcgcggattacattcgatagcaacaagccgcgaatctgtctcaatgaagtctagcgcaatttgtccggtatatcccagtttctgtatgagaacctcgacatacgaccgaataccaggatgatcgatggatttgaagtaaacacaagatgatccatccacggtgtcctgtacgggatatatcgcaagcgcgagcatcttgccgtcccgcgctacagagtacgtgcaaaattgctttccatagatccagacctgagcaacgtagtgattatcgggccctatgagaatattgtcggggagtgggtggttggccttcaaatggtagaggttggatttggcgcggccaaagacgggtttcaatgctaggtcagaactacgatcgagattctgtacatcctccactgatcgacataaccatgtttctggagcatcgagattgaatcgacggagaattttgtgaaagtaccatttgttgtgtaggcaaataagcatgtcgaatgacggagcaaagagtttaccgatgatttctgggttgcccttgcagatctgtgtcacatggaatacctcctcgtgtaaaggaacgataaggtcaatattggcctccacaatcgctttctttacgcctttgacgtagcctgctgggtcgacgtgaggtgcagggacatgccaggatttcttgacggctctcgagaatttgcaaacatggtacttcatggggtccacaacgtagaccttatggccgctggctttgagttgacgggcgaggtcaagggacactgggaaccggccgtttgtcagcaggatattgagcttcctttttgcttgcttgcttgagtgaaaccgtggtacaagttgctcttgggaatcaagggaagcgtcgccgttgtgatttttgtcgtctttcggactatctggcatggtttgagtaggttggcaggattggagtaagtgaggagagcgagaaggagagctgttgacatttataagacatggtgcaaaaacgtgcagtgtggaaaactgaatccattacgaagcgtcatccatcaatgacggatgcgcttacgtcattcagatcgacgcagccaaagaaggcctcttttgcacgagaccttttattaacgaaatccgcccgagcggacgtgtacagcctgcacatgttacggcctagatgggttctgcacctggaagcatggtgctggcgcttcctaacagatattggtttcttcttccaccgtcgcgcattgccccgccccatatccccatcgtttaaccgaagaatcaaatccaccttgtctcccctagagggctacatcgacctggtcttttacactcccaatgactaccatctg

SEQ ID NO: 4565 - DNA, 1610 bp, Spizellomyces punctatus
  source 1..1610: mol_type = other DNA
gagtctgctatcaagagttccagaccagagcctagcagggaccgcgtgtggtagtggacaattatccggttacaaccaaccgttgcgtattgcgtgtataattgccaagtagtagttagctagcttttccgaaccggttgtcgccggttcattcccctggtgtacgaggcgttgacatttgtttttgccaatacactactgacagtgccatacggtatcctaaactcaacgtcccccataaataagccgtgtcatgctgtcgcctttggatgctggatgcgagacgaatgtactgggatctccttggcaatatacgctactatccattgtatccagtgacttatgcatccatttatattgaaaagcacttagtgataaggtttggatgctggcggtgacgattttttttttttttctgaagaatgaacggtctacattagtgtgcaggtggtagaaaatgtcactagggacaaaattctccctccaacccactacagccggttctaatttacaattagccagcctgtccaacccttcataacctatcctgcaaacgagtcccacccctatcctaactcgctacaggttccagcctgggttgaactggggtacgtgcaaagcagcacgattccactaactaactaccactaggcccaattgcacatgcaatacattacggttgtttctaaccgggtaactaagcccaccaccacgagagaaatcctactaagccctttgattccgaaattcttcgtccgaggatgttcagatactaattaaaccagaattagactcggaatatgcgtgggaaaatacaaagataatgcatacctgcgatcgtagcagtatagtagtaatagtgtttgcgaggggttatgttgtatttgtcgggcggacgaggtcctcgacaccagagcggcattctcatgatgatggactgagatatgttgggcagatgcttgcgagtcgaggatgggtaaagaggaaagagggaaggccccccttttatagacctttggcatgcgccacatcgcagtttaaaaaaaaagttacattagcatgccacaccaatctgagtgatagagggggtgctgattatgcgatatgattaaccggattaatccggataataatgggtcctagtgccatttgcaatcacctccacattaatatttccaatgtcgctaatacggtaagatcggctgactttcgctcatatcacgctagatttttttaagtttcaacatatatgtgatccggcattaagtaactgttttccacccttcgaccgtgtcctacttcgttggtattacttgcccaatgtagcacctatgggagtgtcgcgccatccatgcttatcgcttgattcccatccccctgcaatcctccagtgcgagcggctccaccctccgcgtcccacacctccatctccctttccacttgtcgaagttcttctcccttcggctcccacgtcagatcccactggaacatttcaccaagcttcatctttctctccctgcaaatctcataataactcgtcagcaaaaacggctgcatgaggctcggcattggatcgcgccacgaaaatatcacatcccgcgtagttgtta

SEQ ID NO: 4566 - protein, 275 aa, Spizellomyces punctatus
MARKTISPKPSTPSASRTDGDLTREASTPTSTRLCTRRSYAAQGITPVVQKRWGGPTIISYKSLPTTPSTTLEERSPAQKSSTTRSQPSPNLTAKGKSTTKREQSKRQLKRKSEVRPQDAGDKEETGGKKPRTTKSKTLDSRTKEKQSTLQKTASKEPLEDRFTTTWRTQEETMRKQIEQVVNGGSQDIATEDTKPDPGNPFDEEENGADAGDAATTGLNDESEPEETRKIPLGEALQLLHRDSLERLLRYAIVEEVVLKPTDIAEELEATGVLQ

SEQ ID NO: 4567 - DNA, 695 bp, Spizellomyces punctatus
  source 1..695: mol_type = other DNA
tacaacctcttcaacaatggcatatcggagcaggcgttcaagagagtcacgatgcagtagttgtagtgcttcgcccagaggtattttgcgtgtctacacggacatggatattaaaaacgacggtgcagatacagattaacgcgtccaccgattgtcacctcttctggttctgattcatcattcaatccggtcgtagctgcgtcaccggcatctgctccattttcttcctcatcgaatgggtttccgggatcaggcttcgtgtcttcggttgcgatatcctggcttcctccatttaccacctgctcaatctgctttctcattgtttcttcttgtgttctccaggttgtggtaaatcggtcctccaaaggctcctttgaggcggtcttttgtaatgttgattgcttttctttcgtgcgtgagtctagtgtttttgactttgttgttcgtggctttttgccaccggtctcctctttgtcacccgcatcctgagggcgaacttcacttttccgcttcaattgtctcttggactgttcacgcttggtggttgacttgcctttcgctgtgaggttgggagatggttgcgagcgcgtcgtggacgacttttgggcgggtgatctctcctccagggtcgttgacggggtcgtcgggagagatttataagagataattgttgggccgccccatctcttttgcac

SEQ ID NO: 4568 - DNA, 727 bp, Spizellomyces punctatus
  source 1..727: mol_type = other DNA
tcgcacatcgtattggctcattttctttccccccttccatgctgaacacccgtgtcggcagattcagaaccaatcgcattggtgccaattcctgttgccgtcgcagatattgtcgataactccacataatgtacatacagatcattacagccgcaggcgacacgaccgtgacgataatgatctccagcaaaggaacatcaagatcatttggtatcaacaaaacttcaacgcccggcccatacccgtattgggcgtttgcttcgcgttgcaattgctcgtaatcaagcaatgagacaaagaccgagggaactgttatatctgatgtgttaccggtagcgaacatggtgattaggccggagtgaggtgtgtgatctccaacaataacggacttggcgccgctcgcttgcatggcgcgaactttatccacaaatccacactgccctcgctgcacgagagctatccagtttgagagcccagtcgctgaaactggggtgcatccagtgttctttccgtgcgtgtcaagcttggaaacggacaccaaaaatcccaacaaacccggatctggtagctgtggcccaaatgccgccaatcgatcctacacagcaggtcatgcatgagttagcaattgtcaattatcaccatttgatctgaatcaggggaagaacccaagatacttacttgacatgagacgttatttcgcaagacaataatctttccctccgcaaaa

SEQ ID NO: 4569 - DNA, 1605 bp, Spizellomyces punctatus
  source 1..1605: mol_type = other DNA
gaccggtgtaatgcctgatacgaggatcacaaaaatgagcttcctcacacgccaaattgacgttgacgtctgtaccttgagcggcgtacgaccgtcgagtacacagtcttgttgaagtgggagtagaagcttcacgtgttaggtcaccatcggtgcgggatgctgaaggcgttgagggctttggtgatattgtttttctcgccatgttggccagcaatcgccgtggggaagttagttgcgaactcgctatgagcgctccaagccacaaagtcccagatcgatgtttacataagcggcatagaatggcaccgcgcgtcaccaaaacttctaatagtgtgcaggtggtagaaaatgtcactagggacaaattctccctccaacccactacagccggttctaatttacaattagccagcctgtccaacccttcataacctattctgcaaacgagtcccacccctatcctaactcgctacagattccggcctgggttgaactggggtacgtgcaaagcagcacgattccactaactaactaccactaggcccaattacacattacggtttttctaaccgggtaactaagcccaccacgacgagagaaatcctactaagcccttgattccgaaattctttagttggaggatgttctgatactagtaaaatcagaataattagactggataatccgcgtgggaaaatacaaagataatgcatacctgcgatcgtagcagtatagtagtagcagcgtttgcaaggggttatgttgtttttgtcgggagggcgaggtcctcggcaccaccacatctgtattctcatgattcaaccgacagtcgtgatgagaagagttgcacagatgcttgcgagtcgaggatgggtaaagaggaaaggggaaagagacagaaggtcccccttttatagacctttggcatgcgcctcaccgcagtttaaaaaaaacattagcatgccacaccgcagtttggagaacattagtaggctgctttcagcgatggggggttctgattatgcgatatgattaaccggattatccggaaaataatgggtcttagtgccattttcaattaacttctaataagataggagcatacacgatatagaaaaagggaggggatagcagaattatatacaaagaggctactcaagtaatgcaaaaggagaggtgaatatacaacaaatgctccagcgaaaattacgacaaaaaaacggtggggtcaccgagtccttctccggttcgtcgactttgaatgtccaaaagatggaggactgaggcttttcatacctattggactggtatatatagctagttgatacatgtcacacgttatcacttgagccagcgacactatcgccaaggaggggtgttgactctgtcgcttccgttggacatgtatcttgcttacaaatagggcaggttcgtttccgctgcgtaagccacctgtaaagttgacagcaatgcaatcaatgatacagctccggaaggcaactagaaatttcgatacttacttatcaacacagtcgacgtgaaattcgtgcttacacataagtattcgtatttgttccccttcctgaaagtcttccaggcata

SEQ ID NO: 4570 - protein, 596 aa, Spizellomyces punctatus
MPSRGSRRPRECSPTSWQTTVQAPEPGLYYIPSQSWKPIPVTFWLTQEAKDDCGEYYDLLWKRLHSGHKSLFDWRWDKLDGVAIWKVSLKSVFAARLLDGDTKLEIHFLKNIGKFGGSKLDFVTFEGPDIHRLAKQVSEAAELVRFRKLLVIVNPRGLPSGAGVYNDIVGKMLELAEVDIELWVTERPNHAYDFIQQESNISQYTTIITVGGDRIVHEVINALLSRPDWETASKIPLGIIPSGPANALNRSLDTLDPYVATLAAIRGVPQPTDLMAVTTSSGQRVYSHLSFMWGLLADIDLESKWWRWIGSLRFDIFGLWRMVNLRKYQGVLHYLPVDETGPPHLHRGRSLTSPLQARAKFSKERSVRSFSSPPRPRPRPRAPAKYAHLDPSTGLPSGWVTLEAGFTSFTALNHPWISSSLLGCNFTSASDGVIDLVFSQTDRTGFLPLFLEQDKARHMNDKRWHVERVKAFILEPGMNQYGNLGLLDVDGQSIEHGCVWVECLENAIRILVPPDLAVREMERDQKRRQRMKAVQKLERNHMRPWQDIISESELLKLLILLIYDFFIPTAFNIVVCYVFCWCIYHYSLLWAIIRRA

SEQ ID NO: 4571 - DNA, 688 bp, Spizellomyces punctatus
  source 1..688: mol_type = other DNA
agtttatgatttattttgcacctgtgcatggcaggcattgctttctcggccagattgggaaacagcgtccaaaattcccttgggtatcattccctcaggacctgcgaatgcgctcaacagatctcttgatactttggacccgtatgtcgctacgttggctgctatccgcggagtgccccaaccgacagatttgatggctgtaacgacatcttccggacaacgtgtttattcccacttatcattcatgtggggattactggctgacattgatctggaaagtaaatggtggcgatggatcggttctttgcgctttgacatattcggactttggcggatggtaaacttgaggaaatatcaaggagtccttcattacctgcctgttgacgagactggcccaccgcacttacatcgtggacgttcgcttacttctccactgcaagcaagggctaagttttccaaagagcggtcagtaaggtcgttcagttctccgccacggccgcgtccacgtccacgcgcccctgcaaagtacgcacatctagatccgtccactggtttgccgtcgggttgggtgacgctggaagccggctttacttcgttcaccgctctgaaccacccatggatttcgtcatctttacttggttgcaattttacctctgcgtctgatggcgttattgacctggtatttagc

SEQ ID NO: 4572 - protein, 61 aa, Spizellomyces punctatus
MASAIAKQTYNVFFRRSSAYLAGIFASAFAFEIAFDTVSDRVWDSINKGRQWKDIRDKYIQ

SEQ ID NO: 4573 - DNA, 1114 bp, Spizellomyces punctatus
  source 1..1114: mol_type = other DNA
tttcgaaattgcctttgacactgtatccgacagggtgtgggattcgatcaacaagggggtacgttgcgattcatttgttcaaatagcgataccgccagtcggttgacccaattttttgtgccttgcagcgccagtggaaggatattcgtgacaagtacattcagtagaaatgcagatgtacacgcttcatacctccatccgttttgttactcctactatatcaatgttgcacacccggcatacggtttggagtagaataaccatgtaatgaacaataactggaatacaccttttaatatcagtgtggatctatgagtgggtaattaggggaagaccggcatccatgtgtatgtctattgcgctctgacggtcaactacagcaaaagcgagtatcagcaccatgattctgccctgtggccgaatctctctcaccgcatacagcgctgaaccaataggcctacatgagttacataactccatatcatagtcctttacagatgctccccagctacaaagcactcaggcagttgtctccgctgtcttcgcgccagtagttttctcagcttcgttgcctacccgcttgccttcactctccgcgtcatctggtcgacgaattcgcacaggtacggatggcgatgatttgacatcaacaggaatcgcctgcccacttatgacaggtccaactgacattggcattgacatcgcttgtggaatgtacatgccgttcgagtaaaatggtacgggtgcactaatagcacccatcatcgctggaggaacggatgcatttatggctgaggggaacatggaaggggcgtagtatagttgtcctcccggtccataatatgcgaaagcaggtgttgcagaagccgcactcgatccgggaccttctggcgtcgccgggttttgcgcttggggaacatatgagtaattttgatacgcttgagggtacatgtaattgcttgcatagccatccgcggggaccattagcccgttttcagtcattaatacgatttgcccagagctcgtcatcataggatgtatcgtaatggtcgtcggatccggttgccccacgctggccgccgatagcgtcgcgtatggtacattgtccacagct

SEQ ID NO: 4574 - DNA, 1598 bp, Spizellomyces punctatus
  source 1..1598: mol_type = other DNA
caaacggatagaacgggatttcttccgttatttttggaacaagacaaagcaagacatatgaatgacaaaagatggcacgtcgaacgcgtcaaagccttcattttggagccggggatgaaccaatacggcaacttgggactgctggacgtggacggccaaagcattgagcacggatgtgtttgggtggaatgcttggagaacgcaatccgcatactagttccaccggaccttgcagtacgcgagatggagcgagatcagaagagaaggcagcgcatgaaagcggtacagaaattggaaaggaatcatatgcgaccgtggcaagacattatcagcgagagcgaattactgaaattactgatattactgatctatgacttttttattcccactgcctttaacatcgtggtatgttatgtgttttgttggtgtatttatcattattcgctactttgggctatcatacggagggcatagtgatagggtatagtttgtcatattcttcattatttgtttacatttgatccttggtctgtaattagtgtgcaggtggtagaaaatgtcactagggacaaattctccctccaacccactacagccggttctaatttacaattagccagcctgtccaacccttcataacctatcctgcaaacgagtcccacccctatcctaactcgctacaggttccagcctgggttgaactggggtacgtgcaaagcagcacgattccactaactaactaccactaggcccaattacacattacggtttttctaaccgggtaactaagcccaccaccacgagagaaatcctactaagcccttgatttcgaaattctttagtcggaggatgttcagatactaaggtagatcagaattagactgggtaatccgcgtgggaaaatcagcaagaaatacctgcgatcgtagcaatatagtagtagcagcgtttacaaggggttatgttgttgtagtcgggtgggcgaggtccttggcaccaccacatcggcgttctcatgattgatgagagttgggcagatgcttgtgagtcgaggactggtgagaaaagagggaagagggagcaggtccccttttatagacctttggcatgcgcctcaccgtagtttaaaaaaaaaaacattagcatgccacaccgcagtttggagaacattagcaggacgctttgagcaatagatgggggtgctgattatgcgatataactaaccggattaatccggataataatgagttctagtgccattttcaatcacctccacattaagatgtccaccttacgtaatcatctcccgagttcaacccgtacatttccatggcaacaacgcgcttcaagcaatgtttcgaaccaaatctgccagttgcttctgcaaaactgacctccagcaaccgcatcgtcgttcaatagcttttcccaaatggcctctgcaatcgcaaagcaaacctacaacggtaagttgttcctctttcattattaacaaagagattgctgctctcttttaccgttcggctcactttttgaaattcagtcttcttccgccgaagctccgcctacctggctggcatcttcgcgtcggccttcgc

SEQ ID NO: 4575 - protein, 209 aa, Spizellomyces punctatus
MHFSTSTEREVTGQSHNLPPLKRFNYRPSLTSAKPLPTLAALLTYKTWGIPMPPECHFTCYTTFLDNLLKLAPYPARFPLVLIAATYISRLREVFPEASGEEGVEVRLFKTAFVLAWKVYGAEADGEMMCGRGRVAREMEREFLKGINYTLQVSPMDIFKLAARTKVLVSQNPQLFTGKDCMEVALWVEDLNMGIVESGGLNGWSGGVS

SEQ ID NO: 4576 - DNA, 780 bp, Spizellomyces punctatus
  source 1..780: mol_type = other DNA
tgatggtgcgatgttgtcccagagttacattcacaggcttggcgggattcgtggagcgatgtccgcggttgcagaaggttgatattactgggtgctgtggtatttcggtggaggaaaagaaccagttgaaggagctggtggatgggaggtggtaatgtacatatttaaatatttagtttacttttgtcgtgttggttttctgtgtgaaatatattggctttggtaatgtaaccctgatcaaattccaatcttgatgtgattccttctctttcagatcaccgttggtatatattcaaaattacaggaggcaacctgataccacctacacacttataataaaggacattaagtgttcatgagacacccccgctccaaccgttcaaaccaccactttccacaatccccatgttcaaatcctctacccaaagggctacttccatgcagtcctttcctgtaaaaagctgcggattctgcgagacgaggacttttgtcctcgctgcgagtttgaagatgtccattggagagacttggagagtataattgatgccctttagaaactgctcatcaccatttgcaatgagatctcagaatatcaaaagaaacaaattgctgcaaaacgccaattacctcccgctccatctctcttgccacccttcctcgtccgcacatcatctcaccatccgcttcagctccgtagactttccacgccagcacaaaagcggtcttgaacaacctcacctccacgccctcctcgccacttgcctccggaaatacctcgcg

SEQ ID NO: 4577 - DNA, 1602 bp, Spizellomyces punctatus
  source 1..1602: mol_type = other DNA
aggttagtgtactctaggtcattcgcaagttgttgcgaaaggaggtgatggcggccgccgtaggtttgcgtggaggttcttttgcagccttcatattctctcccgtctttcccatagaaccccatcgaaaggaccattcatatgccagtcatatggcatacggtatgagagtaggagtacagacagtgagccagtatttgagatgttttgcgtcctctgaaggcatgtcacagggagttgtttggtcttctgtagttttgtgttcaatcgtccactgcaaatatgcagagggtaacaaacagcaaatgcaatatccattcatccttcaagcctaaatgtcccatttgcacttgatggaatctttcaatgcttgttttaccagggcaatggacgcgctgtcgcaaagtttcatggccgccagtcgttgaatacaacatgcttctctgaccacaacccctcgcaagatgacggaaactcacacaagcttctagcaaacaccaacaggcttgcacaacttgcaacaacgtgcatcttcattgttcaacgcgggttgcacttgtggtgaaggtacacacaattgggaattccctagtgccacagctgctgtccaaccagactctaccatttatccgacgacagcttcgacagttcttcctctgatacatgcctgtgtgagtaactcgcattccgcttgctgtccttcttccatcgggctgcaacgaatgacctttgcggcgtttgtgcatccgtcaaggtcccccttctgacgcgtctggtgctttaggatagacgaacagttgtagtaagttgggaatatgctgtagatagagatagatgttttaaggctttttttttaccaatgtgagactcggacttttaacgcatttgctgccctcaatcagatagatagatttgcatttccaaatatgctcgctactacacctattcccacgcccatcaaagagccttcgatatacgaaattgaaaagccttttacctccaaaccattccatgtcgctcctcctctccctccaccacaagaaaatctagatgttcgatcgtacaagcacctccaatccttgatcagacaggcattgaaggaggtttatgtggacgtggatacatgggagaaagtactgacggaagttgcgttagaaattgctcaggatgtgccgtttgcccttgagatcattggtcgaccgtcgtcaaacggaatggctgatgatggcagcaccagtcttcatcatgtcatcaaagtgacgaccgaaccgtttggcatgccgcaggagtcgcgctacgttcctggtcccgctgagggagagatccctcctgaagtggtggccatagaaccaaatattttggagcttggaggaactgtcgtactcaaaggcacggccaaagatctccccaaaatcgagaaagtaatggaacttgtcgtctttgtcgtttgtaacctaaagttagagatgtacttgtttcgcgatcattttgctgttagacctgattccgctgaagcgaatgcagtgcatcgctcgccaccacctccgaggcgagtagggagatccttatggaactggatacgtggagagaatagaagtggac

SEQ ID NO: 4578 - DNA, 1681 bp, Spizellomyces punctatus
  source 1..1681: mol_type = other DNA
gagacgtgaaatgtatgtcgctgctatcaggacgagggggaagcgagcaggatagggtgcaagtttgagaaggttgtcaaggaaagtcgtgtaacaggtaaaatggcattcaggcggcattggaatgccccatgttttgtaggtgaggagggcagcaagggtggggagcggctgatggagagcgtgttaggcaaagagtgaggcaaaaagaaggagcgactgagacaaccttagcgcttgttagtgacggccggtagttgaagcgttttaaaggaggaagattgtgagactgtccagtaacttcccgctcggtcgaggtagaaaaatgcattatattggcgagttatatgtactattttaaaggaaaaccaaaaatgaacgaaaatagctggttcaagagatcatgtcagtgtcatgtccgaatggaaaagggtctttttgcatcttcaagaaaacgacatgctaagcgtttcgtcgaggtggctatgcaattcatatgtattacatcatccatttgccaaaatctttagtgtggaggtgattgaaaatggcactagaactcattattatccggattaatccggttagtcatatcgcaccccctctatcgcccaaagcggtgaggcatgcagcggtgtggcatgctaaatgtttttttttttaaactgcggtgaggcgcatgcggaaggtctataaaaggggggccttttgctgtctcttccctcttgttcgttatccctcgactcgcaagcatctgcccaacaagtctcagtccatcatgagaatactgctctggtgccgaggacctcgccctcccgacaaaaacaacataaccccttgcaaacgctgctactactatactgcaacgatcgcaggtatgcattatctttgtattttcctatgcgtattccgagtctaattctggtttaattagtatctgaacatcctccgactaagaatttaggaatcaagggcttagtaggatttctctcgtgtggtgggcttagttacccggttagaacaaccgtgacgttatcgcatgtgtaattgggcctagtggtagttagcttttcacgtaccccagttcaacccaggctggaacctgtagcgagttaggataggggtgggactcgtttgcaggataggttatgaagggttggacaggctggctaattgtaaattagaaccggctgtagtggattggagggagaatttgtccctagtgacattttctaccacctgcacactatcatggccccctgaatcactgcaatcctttcaaaagcatgtttgcaataaaaaatagaagtagtctcaatagcgctttggaattgaagggtttttggagtgtcgaccgccctttccatgtcccgctatacgatgccttgagagcgaagagggaaggtaaggacgaatattatcatctgctatttctcaaaactgagacggtatgtttaatttcttgaagaacgtgcatatgcaaaggcatgcagacatggcaaagtgtgtgattgattacgtgaacataatgtagtctttgtcagaacatgccaatcttcattgctttcaccatgcattccccatatatctgcttcattacgaaagaccttgcacgcacccatcgcacaaccgtcgtaaatcgagccagggcagcgagaacggcatgaaagtgccaaagacc

SEQ ID NO: 4579 - DNA, 780 bp, Spizellomyces punctatus
  source 1..780: mol_type = other DNA
gatccaattaatacgtcactctgagtttcacagaaggcgacagcgtctaccttcagaactttctcttcctttttcttgatcccagtagctgccatataagtgtgactaagcataggtccaagatgtggcagaaagctatctcctatccattcttgatgtcgttttcggctagatggtgaatactagtcaatccatgttctcctcccaaggaaaaatggttctccatgttacatacccgtgatagaggacatcgttcacaaggtaaaccaaatgaagccgactctcaaatgctgtgtttacctccgatatggcctccaggagttgggctaatagactcacatgagaagccgtagtgcaatgctcaaagatccacgctttccctgcatggatgttcgtctgggagcaatccttcatcaagacatctagtaatccacaatacttgatcacctcgtctctatttgagagtgaggttgctaaggcgtcacgggcagagcagactttgtccatggctgtttgaagtggattcaaaataggggctgacataggtacgacagccggtgttaaccccaatgcagagaagagctgctgggttaatattgggtcaagttgggctggtggaagtggggctacttgaaaggctgcaccatggtcggtagatgtgcttgttaaaccgcccgtatctatctgtgcgacagaaacaggtatttgcggactcgcaccgtgcgaaggcaacagtcctgtagcttaaatgtcagcaggtccagtaatcgatccactcat

SEQ ID NO: 4580 - DNA, 847 bp, Spizellomyces punctatus
  source 1..847: mol_type = other DNA
ggctcccgaatgtctacagcaacaaggatgagaaggttgaaccgactattgcagtaggagaaagagcgctataggcacctgagtgaacatctctttcagaagttggtaatgtggttggtcatcgaagttcttatcaaaagacaagattggtcgcgatcctttgagacaatttcctgtcatccgcagttcgtccatagtgtgtactgaaattgcatcagttaaaaaatcagtgatgaaactcaagcgtcccatggtacgacgagattaccattttgcacatgaaacttaacactaggtccgtttggagtcttcgacatccacatatacaaatccgtgtgcttgcggatctcaaagtagaggcagttattgcaattgctcagttcggcaagctcgttcagtacgttgagttgatgcttggagtccagttttgactctggcaccaacaaagccaaatcagtaaaaatctatgtgttaaggtaatgaacggtgctcagatcttcaaatgatacctttctttgagtgtggcataagagtaccaagatccttcaggaggtgccggtatctattaagctaaattagcggcttctcccactgacccacctccattaatatgtacctttccgttatccctcgagacgatagtagtaacacccgttgcttattcttcctgaatgcgggtttactgttcttttggacaccctcctgtgtttccccttgatctatatcctcctcgtcctcgtcctcgttctcctcctcctgctcttctatatcgctaccctcctcctcggcgtcttcctcttcagcagcttcggctctcaagagtagctcctttctccccatagttgcc

SEQ ID NO: 4581 - DNA, 1681 bp, Spizellomyces punctatus
  source 1..1681: mol_type = other DNA
tagcacggttccctaccaggtttcttaaactgttggaccttccactgaaaatatgggtaatttgcatcttctggccacagaaagcgatatcttggattgtgcttctggcgctctttggtgatctcgagaaactctggacaatcagtaagttgaggtatctcctaagttgtgcattatgctacgaagtaacctaccctgaccattcctagcaacatactctgccattttgtctagtatcgagacatcgacgcctgtcgaccgagggagagaaggatgagcggctgtacttcgctggatagttttgcattccgcgcaatcataccaggtggcaccgatggcaggagactctgctgctgccaggacgctcctgaagccataacctactgtactgaaaattaggtgaagtcgagagcgtttcctaagttggatggctattgaattctttggtttgacaatacgggtggaactgattggaaccattaaaattccacattggactcgaattctgtttaccgtcgttattgtattagtgtggaggcgattgaaaatggcactagaactcattattatccggattaatccggttagtcacatcgcataatcagcaccctctctatcgctcaaactggtgaggcatgctaatgttctccaaactgcggtgtggcatgcatgtaatgttttttttttttttaaactgtggtgaggcgcatgccaaaggtctataaaaggggacctgctccctcttccctctttacccatcctcgactcaaagcatctgcccaacaagtctcagtccatcatcatgagaatgccgctctggtgccgaggacctcgccctcccaacaaaaacaaaaacaacataaccccttgcaaacgctgctactactatactgctacgattgcaggtatgcattatctttgtattttcccacgcgtattcccagtctaattattctgatctaccttagtacctccgactaaagaatttcggaatcaggcttagttacccggttagaacaaccgtaatgtattgcatgtgtaattgggcctagtagtagttagcttttcacgtaccccagttcaacccaggctggaacctgtagcgagttaggataggggtgggactcgtttgcaggataggttatgaagggttggacaggctggctaattgtaaattagaaccggctgtagtgggttggagggagaatttgtccttagagacattttctaccacctgcacactaacaaagctatttgaatacatcggccaatgggtcctccggaagtttactattccgctgcttctcctccttctttttaccagcctccacccgtctcctatactcctgtgacaattcatgcttcctggtccttctaatctcgttaggactcacaaattcccgattctcaaatagagtagatcctccaaagctcccatcaaacaccctcatgacgcttaagacgaaccgtggccctatttcaatcaaggatatttccttctctttcgttctttcagccgccttttcaacgatctgcatggatgttgatcagaggacggaagtgcagttctgcacctgcacacactgtcttacctgataatttcggaaccatatcttgtcatcagcgattgaaaagcttagcacatggtcgataaacggcttcaacttccgcgatgtccgcg

SEQ ID NO: 4582 - DNA, 293 bp, Spizellomyces punctatus
  source 1..293: mol_type = other DNA
ccaaaagcattcaatgccgtttccacaatcttgtcaccatcctcaacagagtcgtagttgccgactgccttcccaccggcagctttaatttcgttcacaacaacgtcggcggcctaaagacgtaactttagcacactaatctttgttgttttctaaatgtttcaggcaccaaccttgtggtcgccaccctcatctccagttcggcttgagccaagatcgttcacaacaaccgaggcacctacatcaaggttagatcagacaagtggcactacaaggatgatagaaacactggg

SEQ ID NO: 4583 - protein, 272 aa, Spizellomyces punctatus
MSISARYLGILVCGLVFATTVQCSVGGDDDEDDELFGEDTLEDPSTSLILLAAAFATRHLYWLVPTLLVILAVDVVLFFYAAGRIMKDEFVVVRATKLTSQPPAVVWNCLTDWAKYSKWRRDIIGASEPLEEDEAGRPDGEIMERNALSRWIEVGKWGRKTLTTVIEEEKNSLQVRSHQPLPSDARWPISVYLSSITSTWTIEITSPAPSSSSGCVVYLTQQIKIGSPSLRLLMALMGFGGEAERWLADLAAFVGEKDAVVIRPVAGKLMVE

SEQ ID NO: 4584 - DNA, 1496 bp, Spizellomyces punctatus
  source 1..1496: mol_type = other DNA
gccacacctcctcgatgactgttgtcagtgttttccttccccatttgcccacctctatccatcttgacaatgcattcctttccatgatctctccatctggcctgcccgcttcatcttcctccaaaggttctgaagctccaataatatctcgccgccactttgagtactttgcccagtcagtgagacaattccacactaccgcaggaggttgacttgtcagctttgtggcccgcacaaccacaaactcatccttcataattctcccagctgcataaaagaacaggacaacatcgaccgcaaggataaccaacagggtgggaaccagccaatacaaatggcgtgtggcaaacgcggctgctaagagaatcaaagaggtggatgggtcttccaacgtgtcctccccaaacaactcatcgtcctcgtcatcatctcctccgaccgaacactgtaccgtcgtcgcaaaaaccaacccacaaaccaaaatccccaggtagcgagctgaaatgctcatgtttaggtggtggatgtaaactgtgagctcaaaaagatcgaagattctaaaaacgtgaccgctgacttcaccagatgacacaatcggaccttttgactctggccatgttccatcaacctctcggcattccctggcaaataaacatgggcagcacaacaataaatccagacgatatcaaactgatcgtttcagacgttgacgggacgcttttggactcgcaccaccgtctccatcctcgtacacgatcggccattcttcaccttcgaaagacacggccagacctccctttcattatcgcaacgggtaaaccgtacgcagcactcgcagaagtacgagaagaactggacctatcacatttcccttgtattcacctaaatggctgtatggtttatggtcccgggggctctgtcatgcgacaagacgcactagatcccaccgttgttcttcagatagtagacatcttacgccctatgaacaagtctacttatctttatgtgcaagatgaagtgtttgaggtaattaaggatcctgcgggaaggaacggaagggcttggatcgatgtgcttcgaggatttggagaggatgtgaagcctgcgcctgatgggatcttggatcatgttcgggaagggcaggtcaaggtgcaaaaggtggttgtacttgcggatgagaaatatattccaggtaggccctaccgtctgacacgaatgtactcttctgttcaatgtccttactgacacgtactttggaaaatctggagatatccgcaaaaaactttctgcatttccacctgatgcctgctcacagaccagcgccctctcctacgccattgaactgatttgcagtacatcgtcaaaagagttggccttacaaacattgatagattcgttagatgtcacccctcagaacgttctggcgtttggcgatggtgaaaacgatgctggtatgttagctttggcaggacatggagtagctatggccaatgcta

SEQ ID NO: 4585 - DNA, 1610 bp, Spizellomyces punctatus
  source 1..1610: mol_type = other DNA
gtacaaacctcgggacgcaaaaaacgtcgcgtaagcctatatgtgagggaaatctacgtgagcatgccacacaaagtcaattatggcatttgtgaaaaaatgaccttgccaagacctggaaaagacctgtgaacatggcttaaatgcagacgcacgagacaactttacacacctcctccagcaccggtgacaataacaacacggtcgtcgaagcgtagttcagacatgatgggaaaagcaagtgatgagatttggcggatgagaccagtaaatgtcttgtccttttgatcacagttcaacctacgttcggatcagaacgggatttctggggacgccgcgtgatccataaaatgggttgatttgaaaagccggttagatccacaaattcccacgtgaaaacatgtcgcgtgaccaaatagccgaatgaaagatttagtgtgtaggtgattgaaaatggcactaggacccagcattatccggattaatccggttaatcatatcacctaatcagaacccccatctatcactcagattggtgtggcatgtagcggtgtggcatgtattgtaatgttttttgtttatttttaaactgtggtgaggcgcatgctgaaggtctataaaaggggacctgctccctcttccgtcttgtttctttatccctcgactctcaaagcatctgccaacgctcaactctcaagtccatcatgagaatcctgctctggtgccgacgacctcgtccgcctgacaaatacaacataaccccttgcaaatgctgctactactatattgctacgatcgcaggtatgcattatctttgtattttcccacgcgtattatccagtctcattattctgattttactagtatctgaacatcctctgactaaagaatttcggaatcaagggcttagtaggatttctctcgtgatgtgggcttagttacccggttagaaccaaccgtaatgccttgcatgtgtaattgggcctagttgtagttggttgcacgtaccccagttcaacccaggctggaacctgtagcgagttaggataggggtgggttatgaagggttggacaggctggctaattgtaaattagaaccggctgtagtgggttggagggagaatttgtctctagtgacattttctaccacctgcacactaagatgtatggcttttgcaaaaaagatatctacaaggcaaatgggctcatgcaaacgtatctacaagatgcctactctaccatcaattttccagcaacaggtctaatcacaacagcatccttttcaccaacaaaggccgccaagtccgccagccatcgctcggcttcccccccaaatcccatcagagccatgaggagacgcagcgagggactaccgattttgatttgctgggtgagatacacgacgcatccagacgatgaggaaggtgcaggggatgtgatctcgatcgtccatgttgatgtgatggagctcagatagaccgagataggccatcgcgcatcacttggtagaggttgatgcgagcggacttgcagcgagttcttttcctgattatttttttaattgcggtaagtgagcttgacagcttgagcaaaatcaggaatcaaagatg

SEQ ID NO: 4586 - protein, 525 aa, Spizellomyces punctatus
MRTGAPARGLSLPSLTPLEDTKSLSVRTQGARTVRPALQKGVSISSVSERYKSQRISAGSGELGNRTGYHRPASSSSFTAVSVSGDVAGNRGKPLTRAVSISGSGTGPSLSSRRRQSDADSDSSAVASSSTLTSPSKSTARLRQATSTNRLYAGRPAITKQTSITQPPQKSNYVTDVGAHHSSEDFHVLRTVARDGLCTTVLSVLKSDIESACSWYTSPAPIPRTCAIKMFRKTNVVQRKALQRLQRERDVLVKARQDLQGGFVVTLLGTWQNSEHVFMALDWGPIDLREVLRVRRRFDEESARFYIAEVTVALEFLHEKNILFRDLKPESILVDDDGHVKLCDFGLAKSIPAEGSTSTFCGTPGYMAPEILTKSHYSTATDWWSLGIVLYEMLVGDVPYGRDPDPYLTVTLIATTALTLPDTLSQPGRDLVKRLLHPVPRERLGSWHGSEDVKCHGWFRSIKTWRGVVQRNLEPPWVPDVDWEVAACIENRLLALRAGNSDDMERKKEAGLEVVDEYADLFKGF

SEQ ID NO: 4587 - DNA, 154 bp, Spizellomyces punctatus
  source 1..154: mol_type = other DNA
tacttggacgcttctgtgcgaggtagtcgcaacccctcgtttctaacgcatacatcttcactagacatggcccccgaaatcctcaccaaatcgcattattctacagcaacggactggtggtcactgggaatagtactttacgagatgcttgttg

SEQ ID NO: 4588 - protein, 705 aa, Spizellomyces punctatus
MSSTGQVQMCDEQTCKERERGYLPIENYGMIGNMRTIAMCGTDGSIDFFCYPKFDSPSIFLRILDQHKGGHFHISPLGETRHKQQYLPNSNILQTRFLSDQGVLHVTDYMHVPAREPHRKPLLHWLIRQVECMRGSYPTRIEVYPAFDYARAKHTTEMVAEGGDAGTLQHHTDGSGSVTGAQRVVFTSENGLQMDLRHVVHCSEYALGIDLAVADVSPEDEVRPGETRNVPSIRWNIDQKKEMLGPGVWAEVDLREGERITFAFREVPKQTEKDMLVDPPMSNALMESLLKQTFNYWTRWIAQSKFSGRWREVVHRSALALKLLIYEPALLSQHLPLVFQKSLEVKEIGITAFTIYALIRIGLTEEAEGFMNYIEARCQELTPEGALQVMYTIDGNHELPEVTLDHLEGYRQSRPVRIGNGAYDHLQLDIYGELLDSVYLYNKYRTPVSYDTWCQVRRLVNYVCKNWMKEDMSIWEVRGMKRNFLYSKIMCWVAVDRGLRLAEKRSLPCPDRLQWLVTRDQIYEAIMTNGWSEKRKCFIQSFEAQEDATLDAAVLIMPLCFFISPSDPRMLSTIRQIMLPPEKGGLLANNLVYRYDHHMFDDGLSGGDEGSFSMCKWAHQQMAAGACTFWLVEALTRAGQHHPELLQRAIVMFEQMIAYGNHLTLFSEEIARSGEMLGNFPQAFTHIALMSAAFNLDRVLSGYKF

SEQ ID NO: 4589 - DNA, 396 bp, Spizellomyces punctatus
  source 1..396: mol_type = other DNA
gcaaaactcttgattagaggaacgcaaaagcatcatttttgcactgcgctgtcgaaacaaacttacaagcgcctgcagccatttgctgatgtgcccacttacacatgctgaaacttccttcatcccctccagagagtccgtcatcaaacatgtggtggtcatatcggtataccaggttgttagccaacagtccacctacgtagagatcctgtaagcccatataagaggcatcaatgacgccttgactactgtacctttttcaggtggcagcataatttgccgaattgtgctcaacattcgcggatcactggggctatggtacgagaatcaatggtcagacaaaatgcaactatatcatatccgacttttacacagacatgagttttacctaataaa

SEQ ID NO: 4590 - DNA, 1523 bp, Spizellomyces punctatus
  source 1..1523: mol_type = other DNA
gtgacgtgccgtatgggcgcgacccagatccctatcttactgtaactctcatagcgactacagcgctaacccttccagatacgctctctcaaccaggacgtgatctggtcaaacgcctcttacatcctgtcccgcgggagcgcttggggtcatggcatggaagtgaagatgttaaatgtcacggatggtttcggtccataaagacttggaggggggtggtacaacgtaatttggaaccaccttgggttccagatgtggattgggaggttgcagcatgtattgaaaacagacttttggcgctgcgagcagggaatagtgatgatatggagagaaaaaaggaagctggacttgaagtagtggatgagtacgcagatctattcaaagggttttgaggactattaagttaggtagtcagatagaagatagtaaaaggcgaatatttacaaatgcacagtttacacagtatacaatcagtacatactgtggaggtgattgaatatggcactaggacccattattatccggattaatccagttaatcatatcgcataatcagcaccccccatctatcactcatatcggtgtggcatgctaatataatgtaacttttttttaaaactgcggtgaggtgcatgctgaaggtctataaaaggggacctgctccctcttccctcttgtttctttaccctcgacttgcaagcatctgcgcaacattcaagcaacactctcaagtccatcatgagaatgccgctctggtgccgaggacctcgtccgcccgacagcaacagcaatcagaaccccttgcaaacgctgctactactatgctgcaacgatcgcaggtatgcattatctttgtattttcccacgcggattatccagtctaattattctgatctaccttagtatctgaacatcctccgaccaaagaatctcggaatcaagggcttagtaagatttctctcgtggtggtgggcttagttacccggttagaacaaccgtaatgtattgcatgtgtaattgagcctagtagcagtagttggttgtaaggagggacttacttggcttttccgggctggttgtcgctggtttattccctggtgtattgtgttgtgacatttgttattgccaatacactagtatagctctctgtaggtttcccagaaattgaaaacgcgcaatagtaaccctaagctgtactagaacttatatccagacaataccctgtccaaattgaatgcagcgctcatgagcgcaatgtgagtgaaagcctgcggaaagtttccaagcatttcaccactccttgcgatttcttcgctaaaaagtgtgaggtgattcccgtatgcaatcatctacgtagaaagtatgacccttgatgtttggaaggggcccaacatggcgacatgaacctacctgttcaaacattacgatagctctttgcaacagctcgggatgatgctggccagcacgtgtgagagcctcaaccagccaaaacgtacctaaaaatgaagggaagatagagttac

SEQ ID NO: 4591 - protein, 210 aa, Spizellomyces punctatus
MPDARRIEREIRQVQSDKTANVYVQVVGDNLCRLKGMIAGPQGSPYEGGQFLVDIELPDDYPFKPPKMRFETPVYHPNISSQTGAICLDILKDEWSPVLTLKTVLISLQSLLCDPAPDNPQDAEVAKHYLSARADFEKTAREWTQIHAIGGSSVDQIGKTVGVDEVGLDQGSISRVCEMGFERGLVVKALRQFEGDEGQAVEAILSGTIS

SEQ ID NO: 4592 - DNA, 1041 bp, Spizellomyces punctatus
  source 1..1041: mol_type = other DNA
tggcctcagtttaactagcttttatgcgccgcgagatgctgctgtcaaaacattgggcaataagccacttaacaaacccaagtggacctatcctgtaagttccaaaatacagattgttgacttttgaatggctactgacgccttaagcaggtgccgaatcccaggccatggcgatgatggttcaagcggttgcaaagacgaaggaagatcccccagaagaactcctgctctataaaagttcttgttctttggttctttgaataacacccatgatcggcttcatcttacataatcaaatgactcatccaacactcagcacccaagatccacacattgtgcaactttaccctgcgcattatcattcatcttttccaagttttacagcgaccatatacagattttaccaactccgaaaatgccagacgcacgacgaatagagagggaaatccgtcaagtgcagtcggacaaaactgccaatgtatatgtgcaagttgtcggagacaatctatgtaagaccacacaggatacacccaatcatcccactatacgcagctgaatcgccgacgctaggtcgccttaaaggaatgattgcagggccgcagggtagcccatacgaaggtggacagtttcttgtggacatagagttaccagacgactatcctttcaaggtgtgccgcgccgtagtttggccgttcgcctggaatggagattgttgacaatgctcatgtgaactagcccccaaaaatgagatttgagacaccagtctaccatccaaacatctcttcgcaaacaggcgctatatgtgagtctcatcaaaccaactttctcccagcatgattgggatggtcgcttatcgcgtggcggctggtgaataggcttggacattttgaaagatgaatggagtcctgtcctgaccttgaaaactgtggtatgtttggagatgcatggtttgtgattctgtgcctgtggcttgtaacactgaaaggtgctgtgatcagctaatatccctgcagtcgctgctttgcgatccagcaccggaca

SEQ ID NO: 4593 - protein, 341 aa, Spizellomyces punctatus
MAKLELVAELTGHSDRVWSIAWHPTLPLLATCSGDKSVRIWKRDAGNGSWGCVSVLDDAHKRTIRSCAFSPDGRLLATASFDASTAVWERDGDSGEWECLATLEGHENEVKSVSWSASGALLATCSRDKSVWIWEVVGESDFECLSVLQEHEQDVKMVQWHPTEELLASASYDDSIKIWREDDDDWYCSDTLTGHTATVWGIDFNETGDMLASVSDDRTLRFWRPDTSHSNAASLGYRQDPRWKCVHTIQDLHERTIYAVSWSKVNGRIATAGADNCVKVIEKEAMTDENAPKFETIVSLTNAHGQSDVNSVRWCPLNEFGDLLATAGDDCVVRLWRYVNT

SEQ ID NO: 4594 - DNA, 1008 bp, Spizellomyces punctatus
  source 1..1008: mol_type = other DNA
cgccagaaccttagcgttcggtcgtcgctcacggaggctgtggctgcatcagtatatgtggccatcatacccatggagcgcacctcacacacttacccagcatatctccggtttcattaaagtctatgccccatactgtcgcggtgtgtcccgtaagggtatccgagcaataccagtcatcatcgtcctctcgccagattttgatcgaatcgtcgtaagaggcactggcaagaagctgggaggtattcaacgtcaaacatacagtccgtcacggaacagttatcaagaaggccacacacacacctcctcggttggatgccactggaccatcttgacatcctgttcgtgttcttggagaacactcaagcattcaaaatcactttcacccacaactaatctcaggtcagcagccatccatgttctccgtaatcgcttcgttaatcaaagttaccttcccaaatccagacactcttgtccctgctacatgtcgcaagcagtgcaccggacgcagaccacgacacacttttgacctcgttctcatgaccttcgagggtcgctaaacattcccactctgtgcaaacatttatttcggttggtaccccaagacttctgatcagctaatacttatttattacccaccaccactgtctccatccctctcccataccgctgtacttgcatcaaagctcgcagttgctaacaggcgcccatcaggtgaaaatgcacacgaccgaatcgtccgcttgtgagcatcgtcaagaaccgatacacagccccagctcccgtttcccgcatcgcgcttccatatccgaactgatttgtcccccgagcatgtagcaagcaggggaagagtgggatgccacgcaatcgaccagactcggtcagaatgacctatagacgggtggtcagaaactttcacagaaaccaactacagcgaatatattgtcctgtctgcgcctttttcccacctgtgagttcagcgacaagttccagcttggccataatgag

SEQ ID NO: 4595 - DNA, 1598 bp, Spizellomyces punctatus
  source 1..1598: mol_type = other DNA
atccgcaggtgcgtggattatccttttgtcagtcctattacttcaagaaaggcgtattctaaatagatgttgtaggacgcggaggttgcgaaacactacctgtcggcacgagcggactttgagaagactgcaagggaatggacccagatacatgctattgggggttcttccgtcgatcagattgggaaaacggtgggcgtagacgaggtggggctggaccaagggtcaatctcaagagtatgtgaaatggggtttgagcgaggattggttgttaaagccttacgacaatttgaaggcgatgaaggacaggcggtggaggcaatcttgtctggtacaatctcatagttgcttttgaacccagaggaggtggctgcggccagaggaaaagtgagaagtaacgtttattacagtgcctgtagctgtctggttcaaaacacaatatgcggagggttcaatatatagtgtgtaggtgattgaaaatggcactaggacccattattatccggatcaatccagttaatcatatcgcataatcagaacccccatctatcgctcagattggtgtggcatgctaatgttctccaaactccaaactgcagtgtggcatgctaacgtatttttttctttttttaaactgcggtgaggtgcatgcggaaggtctataaaaggggggccttcactgtctcttccctctttcctctttacccatcctcgactcaaagcatctgcgcaacgttcaagcaacactctcaagtccatcatgagaatgccgctctggtgttgaggaccttgccctcccgacaaaaacaacataaccccttgcaaacgctgctactactatattgcaatgattgcaggtatgcattatctttgtattttcccatgtgtattccgagtctaattctggtttaattagtatctgaacatcctctgactaaagaatttcggaatcaagggcttagtaggatttctctcgtgtggtgggcttagttacccggttagaaacaaccgtaatgtattgcatgtgtaattgggcctagtggtagttggttggttgtaaggagggaattactcggcttttccgaaccagttgtcgctggtttattccctggtgtagtagctagtgccagtttctgtcacctctacactaaatacatgtaacatcagattaagtattcacatatcgccacagccggaccacacaatcatccccagccgtggccaagagatccccaaattcgttcaacggacaccatcgcacagagttcacgtcactctgtccgtgagcatttgtcaatgacactatcgtttcaaactttggcgcgttttcgtcggtcattgcttcctgttacatattgagaattctcgttttgaaaatgactccccatcggcggtctttagacagttactatacacacaccttttcaataactttgacgcaattgtcagcgcctgcagtcgcaatacgcccgttgactttggaccacgacacagcatatatcgttcgctcgtgaagatcctgtattgtatgaacacatttccatcttggatcctggcgatatccaagtgatgcagcgttgctatgagacgtgtctggt

SEQ ID NO: 4596 - DNA, 1565 bp, Spizellomyces punctatus
  source 1..1565: mol_type = other DNA
caactttggcgatcgtcccttttcgtacgatgtcaacgcacagccttgcaacgagaatttgcgtcaccaacagccgaaaggtaactagagcaaacgtattctgatctgacaaggagacacgagagactcatatatattttatggactttccagcgttggacgcagtcagtattttggacagcgttggtcctgagcgagaagggctcaatcaggatgaggaagaaaaattgcatctggttagaagaaatatccttaggatcgccatcttgcccttttaaaactaaacgtctgctcggcacaggcactggaaaagaacatcttccgagccaccctggccgtggaggggcagcgaagcttctcacagttcccaccgtccatctaccgacgttcgctagcatgcaccaaaatccaacgaggtacgtggcagaattgcgacagcatttgcgttgcaccacgatatgactgaattgatccaatcacagcgtggagacgacaccgcggtcgtataatgcgagcaaagattcgggaggagcagtacattgcagcaacactcatacagatgatggcgagaaaaaagttgaagagactacgcgccttaaagaacgaagcagcagccaagatccaaaagaattggcgccgacgaaagtttatttggacagcattgttgcgtaggtacaagattttcaattgcagcttgaacagtgcgattaagtagcagtatccttccaggctgtatctaccagcaacctatcccagaacttcaccgatcagcaacggttattcagcgcaagtggcgcaactggcacatgttcaaaaactcacccatcgcaaccaaatacaatgccaggatcgaaggtatgtcaccccaacaatgtcgcttgtagttttattttttttttttttggaaatacacctctgattctttttgtgaacaagatctcaatcgggcggtcaataccattattcattggtggcgacctctacacaagaaaatgtccgagatacgcagattacgggaggtaagaacatccatgtccatcaaaaaatcggcttgaatattcttttaattctaaattgcgttcagaaacatcacgcagcgacaaccattcaaagagtctatcgcggtatgctcatctctatttttcgatgggaattcctttggatttttaaacattttttttggaaacaggatactttttgcgtcagctcttgcgaccagatcttcggcagcgtttgcgtgctctcggagaatctgttgcccgtcatcggtatgacccgaatttcacaccaaggaactctattggtatttatttatttatttctaattttcagagcggaattacttcgcattcgtggtgcctatattctgcaaagtgcctggagaaattatcttcacaggcgggttcgcgcggaaaaggtgcgaacaagacatcgtgccgcggccagaatccaagctctgtggaaaggctactgggttcgatcacgtaagataatctctttcttttttgtttgtctacagagctttgaatctaatgtgttccttttttgaacagatatccacttgc

SEQ ID NO: 4597 - DNA, 612 bp, Spizellomyces punctatus
  source 1..612: mol_type = other DNA
cgacaaccccatcctgttctaacccatctgatgattcttcgctttcggacatctttcggacgcgttgtgaggtccacagcctcgtcactttggatggcgggctgagtacggctcaccgcacatcaaagcccaggatatgcatttttgagggtacagctgcggactctttcaacaagacgatgtggttggacatggctatggctggattcagccaacgaggaacccaaagtcataaaagcaaaagtcgagatgcccccgcattaagaacattcatagaacatctgatatgctactatatgcaacaacgctgatcgggctcacgctccttacgaccgcgatggctgcatccaatcccacaagtaaaccatcctactggaattatcgatgtggagatgcttgcgaatacaaagatactacgatagaagtgcattatagtcactacaccgcaccaaaagtatcacatctcaggtctacggcaaaagcagatcacgggggcgggaaagaagaagctgcgtacaaaatgcccccttcatatccagaagcctacgacaaatccaaggacagggatagctacccataccaaagttctgagaacacttaccgccctatatc

SEQ ID NO: 4598 - DNA, 1444 bp, Spizellomyces punctatus
  source 1..1444: mol_type = other DNA
gcttcacctacggcgaggcagtctttctcacagcagtttgcagatctctgcgtttctgccattttattctcaagatgtacaagccgtgtggcattgtatgcccgcgacgggaagtcagttatacccgagatggtcaaaaaatcattcgttcttaagaatttgtgtacaaataaacaaaagagtgcatggaaggcgatcaagaacgttgataaaaaagtttggattaaacttttccgactgctccgcacaggggtcgaacctgtgaccttggcgttattagcaccacgctctaaccaactgagctagcggagcttgtgtagtatctagcgtacaatcatttacttagagtcaaagactgtgtaaagtaatgagctacactgagattcagtactcaaaactttgtacatagtgtggcggtgattgaaaatggcactagaactcattattatccggattaatccggttagtcatatcgcataatcagcaccccctctgtcgcccaaagcggtgaggcatgcagcggtgtggcatgctaatgtaactttttttttaaactgcggtgaggcgcatgccgagggtctataaaagggggaccttctgtctctttcccctttcctctttacccatcctcgactcgcaagcatctgtgcaactcttctcatcgcgactgtcggtcgaatcatgagaatacagatgtggtggtgtcaaggacctcgcccacccgacaacgacaacaacataaccccttgcaaacgctgctactactatgctgcaacgatcgcaggtatgcattatctttgtattttcccacgcgtattcccagtctaattattctgatctaccttagtatctgaaacatcctccgactgaagaatttcggaatcaagggcttagtaggatttctctcgtgtggtgggcttagttacccggttagaacaaccgtaatgtattgcatgtgtaattgggcctagtagcagtagttggttgtaaggagggaattacttggcttttccgaaccggttgtcgccggtttattccctggtgtagtagttagtgccagtttctgccacctctacactacttgagaatgttaattatcagttggcctcttgtccgtgaatattatgcatgtatgaaacgataactgcacagttttaatccaagtagtttggaagaaacaccactgaaatatgacaataactggagtttgaatgggttgagaacaagagcgttgatggtgtctgcatgtatttgtgtaggtttgtaccttgtccattcttattccttttggtttgcttaatttttgagtattcaatttccaacggggtttggaaaaacatggcaataccaaactgtaatactaacctttgatatgtcatatgggggcctgacaataacaagcatgggtgtgagcttcgcagttccctaaatatattcgctgtcc

SEQ ID NO: 4599 - DNA, 694 bp, Spizellomyces punctatus
  source 1..694: mol_type = other DNA
aaaatcatgaacagagaaaaggaccaatttgttagcgatagcaccagattttcacacgccggatgagtagtgcttacccgatcatctgcaaagttccaatcgccagattcttgtgagctcgttggactggaacttgtagaagacggaggacgaggaacgacactaatgccattcactttgtgtcgtggataaatgcgacgctcggtagtgtgaaacggcatgttgcgcagtacaaaagctccaatgtcgtgatcagaaggaagctaagatgcagtctgaaactaggtgcgagtaagtaaacatccaactacgacagtaaagaaccatacaaaactcctatagaaccgatgacaaacctccgacttctgtgatttggagtagtgagcgaaaataaatgatagaaacgcgggaaagtgaggacggagggtataactcgtgtgtcgcaaggtgtgaagaaatcaagtatgcggtagtgtacgagtgagtcgataatcgtaagggaatggacgagagacaagatgctacggggatgatgaaaaaaggttcaagggagaaaaacgaaaaggatgcgggggaaaagcttgtggtatgcgcagtcttatcctggattggcattaccaacacatttgtccgaaatctgcgggtctcccattggaaccccgtgggcttagtcatgtcggagtgtgacgcgctt

SEQ ID NO: 4600 - DNA, 637 bp, Spizellomyces punctatus
  source 1..637: mol_type = other DNA
ttatttcttccttttggttttcgaccgtgggtttagtcagttgaatgcgataggtggagggaaatcgttgacatatcaacttcccgcggtgctcgatcaaggtgtaaccctcgtcgtatctccacttcttggtatgtgttaaggtgaacggaaaagcaagccaccaatccagtacaaaaatctaaaacatctctgttgagcagcattgatggtgcgtaatcacgtccaattcacggtgcgttgagatgaatcagcattgaatggcttctttcgcagcaaaatcaagtggatgctttgaaaaagatcaatataaaggctgcaaccttgaactctactctgaaggtcaaagagcgcagagaggttcgtgcctgaaatcatgcaaaacattgcgtaactactcacaacgcttccaggtgctgaccgatctcgccctggtcaaaccgaggatcaagcttctttacggtactagtgtactcccaatccctatgaaatgcctgcctcattactcactcattctatctgtccagtgacacctgagttaatggcaacggatcactttcggacgactctcgagaagcttcatcagagagccatgctatcacggctcgtcattgatgaagcacattgcatctcagaa

SEQ ID NO: 4601 - DNA, 1612 bp, Spizellomyces punctatus
  source 1..1612: mol_type = other DNA
ttgaacaaagaacgatcgcgctctcctgctgatgcgggttcttgtttgtcttgatggtagttggtgcaattggtggtggtgctgcaagttccatggcagtatagacgggtggcatagggtcatgggttaagcacgttgggaagaacttgggtggcatcgtttgtttggacatggtttatcagcactctctgtgaatgaatagacattttagatgatgatccaacatgatccaacaagaagttccatatatctgccaatcgcaatcctgcaacgtcaaaatgacgttcgttccggatacgccgcagcattggtggtatcagtaacaagatgcccatcggaaactcccgacatggtcgcgtggtatatcacgtatttttgatattcgacctccttctcacctgtccgaaggggcccctgaagaaccacggaggaccaaaggaccagagcatgcatagtgtggcggtgattgaaaatggcactagaactcattattatccggattaatccggttagtcatatcgcataatcagcacccccgctgtcgcccaaagcggtgaggcatgcagcggtgtagcatgctaatgtaatgttgtttttttttaaaactgcggtgaggcgcatgccaaaggtctataaaaagggggcctttgctgtctcttccctctttcctctttacccatcctcgactcacaagcatctgcccaactctcatcaatcatgagaacaccgatgtggtggtgccgaggacctcgcccacccgactacaacaacaacataactccttgcaaacattgctactactatgctgcaacgatcgcaggtatgtgttgtcttcgtattttcccacgcgtattccgagtctaattctggtttaattagtatctgaacatcctccgactaaagaatttcggaatcaagggcttagtaggatttctctcgtgtggtgggcttagttacccggttagaacaaccgttatgtattgcatgtgtaattgggcctagtagtacttagttgtaaggagggaattacttggcttttccgaaccggttgtcgccggtttattccctggtgtagtagctagtgccagtttctgtcccctctacactaccaagcccctggtgttaaagcaaatccatcttacatgatcaatgtcacgtgatgagtccgatcgtccttcacctcccgtatggacattcgcacgatttcttccttgcgagccaatgtcccttcccattagttcgtattttacgagaaagcccgctcttcagttcgagagccgctcatcgagttcgggaggggtggtcaacgttgatgccaagagcaccatcgagctgaagaaaactctgcagaatggtacaagcgcgaaggaactttggctatctgttattcccaccaaacatttatgtatatgtgggatatccaaccgtcattgcagtatttggtctttcagaatttcggggagatcaagaggctgttatcaaggcagcccttgctggtatttgccaagtcctcgttaacgtttttgcagcgagcttctgattattgataactcataacattactaggaaatgattgccttgttctaatgccaacaggtgcggggtgcacagt

SEQ ID NO: 4602 - DNA, 637 bp, Spizellomyces punctatus
  source 1..637: mol_type = other DNA
atgttatgctttcaacgtgcctactgccgaaaaggcaaatgttgcagctacagtgtcaaccggtcgcaccagacgtgatgtcggtgctctccacgcgaccaaaggatctctctgatgtggtcgttcaagactggatagtaaacagcagacgtcagaatagtccactaaaagtattccacattctttcatcatattcagttcagttggtgcaggtaaaaagcacattcgcaaagattatctcaaggagatcacgacactctgctgcaggacaggaaataaaccgtgcaaacaaaaatggtgtagacggcattttcgagatctggtagataaaagtgattttacaaacccgtgtcccgagtcagacgtactctggtcatccgtggtgagagcggtcagttgatgaacgctgcacacaatgccctgatcagcgggtgctaaaaatgtccccgagtacgattcctacatctttgtgcacgtcattagcattactccctttcgcgcagagcatttgttactaatcccgagcctataatatacaaagatatctcaaatataattgatactgcggctcaaaacgtcggtttctcagagaatatgaccgagttgaagatcgctcttaacgacgccgattttacga

SEQ ID NO: 4603 - DNA, 1316 bp, Spizellomyces punctatus
  source 1..1316: mol_type = other DNA
acatactctggccccaaagcggcctactagaagagcgcgaatgggcttttctaggatacaaactgcgttaatgaaccttggaaaactctgtcaccaatgacgtagggcctatgcgtcaagcgatttgcaaagaggaaacccttgtaactcttgagcgtgagataaaacattggaggtagaaatcgttcattgaggatggagaaatcccgaacagaaggggatttgtccgtattattgtcttttggacatacaatattagtttgaggaacgaatgtttggggaacgatatggatacagaactgacttaatggatgctacaagtactaggcaaagcggtattacaagacggctcagttgattgttttatgcggcgtcactcccgtgcgataaacctggatgtctatcgtcttcttggttcagtgattaggtcaataccagcccttcttgccatctaagcccaaagcgcggttaacacgggaatgcctggaaaaaagaaataagagcgtgctattcgcacagggcaaagcggtgtctcatgcagtctgttggcttgactgtacggcaggtgcaaaacttatgcaagggtatacttgttggaatgactcttcagggccaatgacgtccataagcagacatcttgaaacattagccaacataaccaatacattgtaagtgggttattgctaattacttgaattgattattctgggtgtaactgatagccaatcttaacttgtgccccacttgtcacttcacttacttacttgacggtagaaagtaactaaagaataatctggcgtacacaggattggatgttgatggaatatggtagcatgctgtagagtgatcagatgtgaaaaaggtaaataaccagtgaatgcttcaatgattccaatgcattttcctcatcttccttgttccttaaactacaagtaaatggcaccgttgagtcatcttttcaatgcaaaaagccccagtaccagacagtgtgggatggctcgttgagtaaaaattggggactaaacacacccactattatgaccaaaagtgtaattcggaaagatacaaaaagggtgttgaaaagatctatgagtgatacccaataagttggtatagaatttccctgctctactttcatcacgttcgtccaacatcgaatttctttcgttgtctataagaatgttgcaaatcgggtgaacctcgcaaagggaaactcggtttgtgggatggttcctgctgggcattaggtcacggtatatatacaagtgcacagagttccatctgatacaattcatcccaagctgccccgtacggag

SEQ ID NO: 4604 - DNA, 1612 bp, Spizellomyces punctatus
  source 1..1612: mol_type = other DNA
gtatcagtctcgttcttctggcgtgtacagagagtagcggcatgtctgcacaacatcgtgtactctttgtttgtgaagcagaggcgggacgaatcttgcaaccagggtgcaaaaaggcgttcctcaggctaaatgaggaagatatttgttattccccacatttctatcttcagagtcttatgttcgtttgtatgacagccggatgaatatcttgtattccaaaggaacgataatgtcatgcccgtgccagtgtatgacatgcctattatccctggctttgatgataaaactgcacatagagataggatccgttaaacgtactcgtgaatttatatttcctacccgcacgtaaaaatatggaagcaactttaaaacttaatcgcttccatacttatttaattactagtcccagcacaaatgtttaaaccagagcacgtgcaaacctctcacgagcatttcgaaagtgaaggttaaagttaaagttactgacataattaacatacatagtgtggcggtgattgaaaatggcactagaactcattattatccggattaatccggttagtcatatcgcataatcagcaccccctctgtcgcccaaagcggtgaggcatgcagcggtgtggcatgctaatatgatttttttttttaaactgcggtgaggcgcatgccaaaggtctataaaaggggggccttctgtctctttcctctttacccatcctcgactctcgaagcatctgcgcaacgctcacgcagcactctcaagtccatcatcatgagaatgccgctctggtgccgaggacctcgccctcccgacaaaaacaacataaccccttgcaaacgctgctactactatgctgcaacgatcgcaggtatgcattatctttgtattttcccacgcggattatccagtctaattctgatctaccttagtatctgaacatcctccgacaaaagaatttcggaatcaagggcttagtaggatttctcgcgtggtggtgggcttagttacccggttagaaacaaccgtaatgtattgcatgtgtaattgggcctagtggtagttggttggttgtagggagggaattacttggcttttccgaaccggttgtcgccggtttattccctggtgtggtagctagtgccagtttctgtcacctctgcactaaaatatattaatatgaggcgccgatccatggatcaaaccctgggagcgggtttaacttcattgagtagcagaatcaaaccttgattgtgggcgttttattttgttggttatttatccggctgaaagatctccaaatgagcgataccgggcaattcaagcagcgagggcatttatgaggcaaggaatgtatatagtcggaggccttttccaagacacgagagcatggatgcgcattgtgagctccagcgataatttgaaatatgtgtcaaagacctcaacgcatcaagaatggagtaaatggtttatagattgtcgtttttgctttaacttgtccctgcggtaatgttgggggttttattcactttcatctgcaaacacgacatccatggcaattactgcattttgtgtgacagcttgaccgttttctgctgagcagatttcctg

SEQ ID NO: 4605 - DNA, 1161 bp, Spizellomyces punctatus
  source 1..1161: mol_type = other DNA
gagtacatcgaagagaatcgccagtgaagaacatatcctctgcatcggatgcgcagggttctgagatcgcagctgctattgagaaggtggcaaatatccgatcgaatccaccatggaagatcagctacacagcgaaaatcgcaggtcgcgtcaaaacgatcgagacgtcagcgtcaactggtaaagcggggaaatcagtacagaatcaaacaggttgctttctgaaacttttcgaagcgcgcataaggcttccgtctccaatcaaagagagacgaagagcatctggtgactgggatatcgaagattctggagatgaaagaaaggaagaggagggactaagatgtccgcagtgtctgcgagtgttgagcctgccgttgtcgctttctgtgggtcgtcagttttataagctacgcgaaagtgaggttgtgagagacgatgaaattgttatccgagatccaatcgcgttgtatgaattctgtcgtacgcatactgcggaagatgatataataccggctggtttagccatgggatatcctcgagagatagacttcaaaaatacgcggcgccgtgtacggcagatgtttgccgatctactaaggattattgaaggaagggaagaatcctactataggcaattggcattagccctgtacaaagagttggggacgcggaaagctcaaggtgactaagcgagcaggatgtggacgtgctcttgtagtgtcgctgagtggctgatgttccaggtgtaagatataagatgaatacaatgaagggaatatcgtgtgggtattatgggaaggtaagcttttcctaccgagaatgaaatatgacttgtttacgaacatttccgtgcattctgtagactggagctagggtcatcatgaaaactatctatgatatgtttgtaggcaccgctggaaaaacgccctatctgactgcaaggatgaccgcaccgcaacccatcatcgaatatattcaagacgtccttgtcccagaagcagcgattcggctcattatggacgattgcaccattcatgataagcgccaagctcgggacatcctgacggccagctcggacttcggatccgtcatgttcccagatagtgacgatgagcacagtgatgcagatgaggagcccgacttgctgcattcacccagagt

SEQ ID NO: 4606 - DNA, 1023 bp, Spizellomyces punctatus
  source 1..1023: mol_type = other DNA
ctgcgtcttgtcgaacacgagttacagtgacctcttccgtgcatcgcttttcaaaacggtggtgagtgaggaatggggcagtgaacatcttggagtacgaattcagacgttgcgcgacttggcaaaagatggtcgcgatttgcgggaactggagctggacgtaggacaaaagttatgcgaatggaccacgcagtttgcggattttaacttggaggccaaggtaggagcatctgtgccaactacagttgcgtccgcacccgctagtgatcatatgacgccagacattgcttcaacgcgacaactgcttgcccttatcaccaatgtgatgaagttctccttcttatctcttcgcgaatcgcatgtcgcgcatttggtggtaaccgcatgctctatggcgtcccgcactacagcgattgagctcgttcacgacgtgctactgttattggacggcgtagtgcgatatggctctgttcccatggccgccttgcggccagtgattgagatgctgtcatatacagtcaacctggctgcatacacgcaagaaagctggcaagtaatgcgaaatctgcttaaatcacatagagcgcgacacgcgatggatcacctttgccgcatcattgacggaatctcatcaagtgagcaagctctccaactccggggagccgtctttatggtcgccatggctagctggggtgcacagcgagtgaaaaatctctcatacccatacatgtacctgttgccgtacttgcgacgagcgacacgcttaggtgataaggacgttaatactgaagtgctcctatcaattcagcgactgatatcagagaacggtgaagaactttcaagggttgagtgggagttgctgttggatattttgcgagagatgagcaaacattttgtggtggacgcaccaggcagaccttgccaaatcagtggcacgaacgccaaatcttggagcgaattcgccgctccatctcctttgtttttcgacttattcaatgaagtattgatctcattgaaagatgt

SEQ ID NO: 4607 - DNA, 1372 bp, Spizellomyces punctatus
  source 1..1372: mol_type = other DNA
ggcgtctggtattacaaattcagataccctattcgtttcgtctccggagatgacggaggaagaaaggctgacaccggatggcacgtcgcaggatcttacgggcgaatggtcgacagattatgattcaatcatatgggttgtttgatgtacgttgtttgcgcaaaatacatcaaaagcgaataataccacccttgtccatttccaagatttggaagcaaattggcataatgtagacgtgaagagtggtaatagcaagcggcaccaaagttaaagggagcttctttcttttatacatcctgataaatgcttcttggagcatcactggtgatgtgccggtctttcggtgtgcttacgtgtgcgatcgatgagtcataccccgctaactcaaaatgcatagtgtggaggtgattgaaaatggcactagaactcattattatccggattaatccggttagtcatatcgcataatcagcatcccctctatcactcagattggtgtggcatgcatgctaatgttttttttttaaactgcggtgaggcgcatgtcaaaggtctataaaaggggggccttttgctgtctctttcctctttacccatcctcaactctcaaagcatctgccaaacactcaagcaactctcaagtccatcatgagagtactgctctggtgttgaggacctcaccctcccaactacaacaacaacataaccccttgcaaatactattattactatgctgcaacaatcacaggtatttcttgctgattttcccacgcggattatccagtctaattctgatctaccttagtatctgaacatcctccaactaaagaatttcggaaggatttctctcgtgtggtgggcttagttacccggttagaaacaaccataatgtattgcatgtgtaattgggcctagtggtagttggttggttgtaaggagggaattacttggcttttccgaaccggttgtcgccggtttattccctggtgtattgtgttgtgatatttgttattgccaatacactacctactgactttcgctccatcgtacgcatgtccaatccactcgaacggttaaagcaaaagtttaaggcccgtgtagaaaaggaggaagtctctgccaccgcaagcattgatctccagccggctgactcttctatcctccccgacctcagtatcatagtcgagaaactcgatccgtccaaacccattgaccagtcgcaacgtgcgcagagtatcactgagcttgccgatgcagtgcaaaaatttaatctgtcctcagaaattgaagacttgtggcagcttgttgtaccattcaccaaaatttcaaactcggaggcagtccgacatggggctttaggttttgcacgcgc

SEQ ID NO: 4608 - DNA, 3971 bp, Spizellomyces punctatus
  source 1..3971: mol_type = other DNA
gtctgctgactttcatgcacacagtcgttaccgcactcgatttccgctccggaaatgacatcgtactctgcataccgcgcgtgatgcgagccatactcagcggatttgttcgctccgatcccgagtggcatggaagcagacggattgtgtggctagaaagcattgcgactgtggtcgcagctgtagtgcaaggcattgcaagcgccgcacgtcttgatgggtgcataaaggcggagacggccacgtggtggtgtaatgtcgctgtggacgtaagtcgattactatatgatacgttggcagcctttggggatgaggagaagctagctaccaatgggtcggctgtatctccgttcggcattggccacgtattggatctggcagcagttttggaacaatgcgaacgtgtattacctccagatttcaaccagaatggcacgaacgaccaaggcctcaatgaagcgtccaacgtctccctggacactttggatttggacgggctgtatagtctggattacgacctgagaaggcttctgaaacgagcacgactatatctctttgatgtcacctctgtcctttctatacctcgcctaccgtcccttcttggtgatgtccgggttagctggcgtgagatgctggcgcgcctgttggactatacattagagtgcacggatatgtatccggagatctggcgctcagctcttcccgaccgcgtaacgccgttagaccgctacacggagttcttgctgcgtctacaaatgacacatcccgatgccatagctgcatgtgtattaacagacgagagtacaaggcgaagaaacattctcgggcggctggtagccatgtggggactgattggaacccaattcagcaagaaggcaagattgcaagctagtgtaagtatggttattttagcgcagcaattgacgggtcacggccgaaagcggaaacgggatgatgatggggagataaccggggaccgtcctatatcagcaatggagcaacttgcaggtaacggccgcacctggtatatacgacacccaacttggtacataattgtgaattgtttgtttacagacaagtacgtcccgcggttcgctcctgatctcccgcgaacaccgttttcgcgaaagctcttgtatgaagtggtgcccatcttgcttgggaagatccctaaaccagatcagctactgaagtccaatgaggtgggcaatgtggtagacattctccaggctaccataaggcgtatttggggtggtgacgattgtgatggtatcagccgggaggaacgtatatggaccaaagcgttatcggaaataacgggcaaaagtcaatctttgtaagtatattatatgggtttcattgtatcatagcgtagcaaatagtttttagctagacttatttaaaatatcttattgaggtgattgaaaatggcactaggacccattattatccggactaatccggttaatcatatcgcataatcagaacccccatctatcgctcagattggtgtggcatgcatgtaatgtttttttttaaattgcggtgaggtacatgcagaaggtctataaaaggggggccttcactgtctcttccctctttcctctttacccatcctcgactcaaagcatctgcccaacaagtctcagtccatcatcatgagaatgccgctctggtgccgaggacctcgccctcccgacaaaaacaacataatgccttgcaaatgctgctacgatcgcaggtatgtattatctttgtattttcccacgcccgtattccgagtctaattctgatccaccttactatctgaaacatcctccgactaagaatttcagaatcaagggcttagtaggatttctcttgtgtggtgggcttagttacccggttagaacaaccgtaatgtattgcatgtgtcattgggcctaaccaccctattagcgattcatgtgtaaggtaaatgtacttgtgcatagtgtgcaggtggtagaaaatgtcactagggacaaattctccctccaacccactacagccggttctaatttacaattagccagcctgtccaacccttcataacctatcctgcaaacgagtcccacccctatcctaactcgctacaggttccagcctgggttgaactggggtatgtgaaaagctaactaccactaggccagcgtaatttgcctttttgggagctgcctttggtgttggctccgcgatcccgaatcgcttgcaaatctgtcccacgccattggctgcttctagtttgagtacacaaagcatgtggcagccaccgccatcggatgaagagctattcgggtctgacgtcgatgccgaagggtcagaagatggagagtatgaggtcgaggatgatgaccaggcggatggacaggagccacctcttagcgcttcagtagaggagtcaatggaagtagaggaagaaggtacagtgaggagttagatgctcagccgtttcctgctgatagagttgcgaagtattgtgttctcagtattagtcaacggcgagtatgacagtggtgagatcaatgtgcaggaacacgttggggaatgtgctggatatgaaatagacccgtttgtaagcgacccagctttgatcacattcatcatattggatttcaagttctgatcagattgtgttgtgatatgtgaataggcgtcgctcgttcacccggcgagcgtgaattgtatggcggcgacacggaacatggtacagacagtttttcagtgtaatttcggtctgcatcgatgtttaactcatatgccttgaataatttatagcgctggctattcacgggaggggatgatggattcattcgcaagtttgactttgctgcaacggtccggggagagcagttgttgacgcagacgcaacgacatggacttgtggattctatcgagaaggttggtccatgcttcgttagatggcaaggggagaagttagcgaaatggattgggtcaccgaatactgacgttgaccggtgcgtacaggcaggtgttctggtttcagcctgggagaacgaggaattcccgtcaacatgtgagtgatcacgttgtacctgtagttgaaataacgtgcacctgttaaccatgccgtacaatagacacagcagacgggctacctgccctggaccccgataatccacctcctctagcagcggattggtcaccggtatacagcatagatgttcactcggaagctcattggtgcttgaccgggtgtaaggttcgaccttatccttatgcgtagtctatctgtggggattgttgctcatcacctcgcttattgacatatagagtgggaatataaatctgtggtccatacgacacgacgaagggcacgtaggtactttttcgtaacgaataagcctttgcggctttattactgaccataccgttcttcactgcatttcttcaacagtgtcagcacattctgcgcggtcacaataatgctgtgtctgtgcttcgtattacaccgggggagcggggagtaattagcgggtcatgggacaggacactgctggtatgcgtgtttttcagggagggcaaaaaggcatcatatgtgattccgctctttcacacagcgatgggatctgaacaccggagaaataattcggtcttttcaaggtgtaacgtcccaagtaacgtccgtaagctttagtccttcccccgcatcatgctatccagatttgataaatacggaggttgtgaacggcatggatgctttaatggccccatcagctgctgaggattccttgttgatggcgaccagctacgatggagctgtgctcttgtttgaccagcggcatccaagtgggattggcagaaagctcgtggcatcgatgagtggcgcccctccatggactgtttcggtacgtggtcctgtacaaatggcgctgcacatcgttgagcgatctaacacaattctacgccaggctacatggagtgccgatggc

SEQ ID NO: 4609 - DNA, 874 bp, Spizellomyces punctatus
  source 1..874: mol_type = other DNA
cttaagtgggagcaggaagccggtatcctgccagttgccaaggagagcccacccgtccaggtagaacagtcgacagtgaaacccatgaagagtacttcaagcaatgccagtgaaagcactccacaacaattgcaaagccgcattcctcgtctgcgccgagaaatgccaagctctggtagtgaaaagctgtcagaagagctgcaaattatggctaccacagttgagcgcttactgcaaattgcaccgcgccgaactgatattacgaacaataaaggggtccgacatgttgataagctccaacgcgtaagagcgtcagcaccaggttctatgacaaagggacccgggcagcaaagaagaatcatgaccactgcattgcattctggtcccggaaaatccgttatggaggcgcccaaaaagagggtgttatctgcagttcacgacggagaaaagacatcacaaccccggccaataagttcgcagcaacatttcacgcaaaaaccctcaccggcgcaacgattgcccaaaatcaagtcaaaacaagatgtaccacactccaagcccgcttccaaccatccgacgccccgtcccccctcctccgaaccactcctgcggtcatccaccagaagaataaaggtctcaaactcaaaccagaggcagagccagcagagccagacacgggaaagcgtgataatagaacagaaagaatggaaaagaataaaagccctcaccgagcctcagaccaatcttcagccggcacagcccacattccaagactccgctgagagtgaagaaggaatcaccagtgctcttcaacagagcaaaaatgccgtcgaaaaatcagacacctccgtgaacggatgtagtaacttgctta

SEQ ID NO: 4610 - protein, 334 aa, Spizellomyces punctatus
MPLTTLERIINLKESSSLIVIEDSTKQSCARLLKAFAASSIGPDRRLVVVSVEQAYWKWKRILNLESLTIIDVYSSCFSWLDPPVAAPVRSANIKNLVSVIETELQTAQNGRITVLFDSINPFLLRYSLATVARLVKSLSALGSDNVRIILPFHGDVPVLDASGNSLIPPIGSVLANAATTYVTVRHGKDFGIIFGRDGGAVDVFETVDAHNPAGGICEVLHKKKSGKVLREAVAYKVSATDSDLLTFHTVDDLRSVNDSQPSPPSNPAERTPDPTANLSFNLRLTDEQKVARAEVVLPYMKAQTAEGPSETAIYYEPEDDDYDDEDPDADLDI

SEQ ID NO: 4611 - DNA, 398 bp, Spizellomyces punctatus
  source 1..398: mol_type = other DNA
acctccaatcgggtccgtcctggcgaacgcggccacaacatatgttaccgtccggcatggaaaggattttggtatcatatttggacgcgatggcggagctgtggatgtattcgaaactgttgatgcgcataatcctgccggaggaatatgtgaagtacttcacaaaaagaagtctggaaaggtcctacgtgaggttcgaagccgggaataattgagtttgctattatatgaggcgaatagctaaagtgtgccttgctacaggcggtggcttacaaagtatctgctacggacagcgatctcttgacgtttcacacggtggatgacctgcggtctgtgaatgatagtcagccatcccccccatcgaatcccgcagagaggacggtatgcacaaagacatc

SEQ ID NO: 4612 - DNA, 2210 bp, Spizellomyces punctatus
  source 1..2210: mol_type = other DNA
aaaaaagcaaacttgaatgtcccgagaagaacggaggggcaagaccgcccaacaaaaattccctacctagttcctctgcgttgcataatgattccgactctagtgatattccaccaaacaacgttcaccaggaggcaatgacgacatggctgacgagccttcgttcgccatcaccgccaatacctactctccaattcaaggatataacaaccaggtctaagcagcaatctatatcattgtctgttgagcaaccaaaggttggtggatgtgaagtcgcagtgaaacaacttcattttgatgctgtttaatttgtatcataggacccaccaacttccaaaagaccgtcctcggacgagcagaaagtagctgcagcacttgatcagttgcgtaattttgaaagtatattagtggaagaaaggcgacgattggatcaagaaatgtcaaagactgccaaataatattaatacgccttttcattcgctacgaggtgcctctgaacgtttcaaaatcatgataactgtatcacatgtagtccatagaatgtgcatgcggaacgacgcagcttttggtgtagaacatagcagctttttggttagaggactatctcgtatctcgtcaagtgaactctaatgattccatgcggagtctgttcagatactgacattccaagatgaagctaccatagtgcggaagtgattgaaatggcactaggacccattattatccggattaatccggttagtcatatcgcataatcagaacccccttctatcgcttaatgttttttttttttttcagctggaccccattttgccacaatcgaggtctataaaagggggtcattactccctcttccctctttcctctttacccatcctcgactctcgaagcatctgcgcaacgcccacgcagcactctcaagtccatcatcatgagaatgccgctctggtgccgaggacctcgccctcccagcaaaaacaacataaccccttgcaaacgctgctactactatattgctacgatcgcaggtatgcattatctttgtattttcccacgcggattatccagtctaattattctgatctaccttagtatctgaacatcctccgactaaagaatttcggaatcaagggcttagtaggatttctctcgtgtggtgggcttagttacccggttagaacaaccgtaatgtattgcatgtgtaattgggcctagtagtagttggttggttgtaaggagggaattacttggcttttccgaaccagttgtcgccggtttattccctggtgtagtagctagtgccagtttctgtcacctaatacactatccaagatctccgaccagccttatttaacctgattggattcagcattggattgaagttcaaccggagagaaccgttttacggttctgcaagcatgaaagcaactgtcagatctcacctagatcctatcaagtaaaacatgccattaacaaccctagaacgaatcataaacctcaaggaatcgtcgtctttgatagtgattgaagactctacaaaacagtcatgcgctagacttttgaaagcttttgcagcgtcaagcataggtcctgacaggtaagtttctttgaccgttgattgacaaataatcatggctaaaattgccttgacatcgaaggaggcttgtggtggtgtctgtcgaacaggcgtactggaaatggaagcgaatactgaatttggagaggtatgtgaaatgctgaggaatgcggaaccgatcgttactgacggtacactaagcctgaccataatagatgtatattcctcctgcttttcatggctcgatcctcctgtggccgccccggtccgatctgctaatatcaagaatctggtatcggtaatcgagacagagctgcaaaccggtacgctcaattgctcttttggatgtcgcgctttggattcacacctggaaatattctcagcgcaaaatggacgaatcactgttctatttgatagtataaatccgttcctgctccgttattccttggcaaccgtggcgcgattggttaagagtctatctgcacttggtagcggtgaggcagcgctgttggttgatccatgcataacggcaaaacccctcatggatgttatggcgattgctagataatgtccgaatcattctccctttccacggggacgtacccgtactggatgcgtcaggaaattcgctaat

SEQ ID NO: 4613 - DNA, 893 bp, Spizellomyces punctatus
  source 1..893: mol_type = other DNA
aacggtgtctactcctacacctggtgcaccgtcatttggccacttgggcggtaaaaccgacgctactgctgcggctaaccccgcggcgtctaccccttcgggcactaccttcggcggctttggagcgacgtctcagattcccgcggcggcttcaccggtcccttccacaccgggttttgcagggtttggaggaaaaccggagggttcggcgaccactgcccctacctccgcggcacctacttttggcgggtttggtgctaagccacagacgtccgcctctgcccctacatcagcggcgcctgcttttggcggattcggaacgcaagtcgccgcaccaactcctgcacctacgacacccgcctttggtggctttggcgcaaatactaccgtcacaccgcagtcgtcagcaccggcatttggcggcttcggcaccaattcctcaaccgcagcgtctacaccgactacgcctgcccccgcctttggcgtcggcagcggtgcacaaccatcctttgcgtttggagcgaccggacaaactgccccaaatcccactgcaccggctccgagtacgccctctgcaccattcagctcagccattgggggagccaatcaatcaaactttggcggacaaagtacttttaagtttggtggtggcgctcccgctgcatctcctgcacctcagaatccgtctgccggaccaccgtcaacgccttcctttggtacgcctcaggcgggtagagcaggtggatttggcttttcgtttggaggtactcctggctcaaatgctggcgggggtacacctcaagcaggtggtttccagttcagctttggagccggcggacaaccggcacaacaaccacaaccgcaacaacaacaacaacaacaacaagcgacaa

SEQ ID NO: 4614 - DNA, 637 bp, Spizellomyces punctatus
  source 1..637: mol_type = other DNA
actttggcttcgatattgcgccgttttcctgcgacatctggttcacgaccgaacaaatattcatcggcatcttgttggcgcgactctcaggtaagcgattaccatgccaacaaactgggcaaccccaccagagcccaactttgtcctgatctctacactgatctctacgctgctttcttcaccgtttgcagcgatggcattagtagccacagaaacgacagaatattgtaatcagctggtgaatgtattgtcaaagctacatgatcccaatgacacgaatattaaggaatgggtcgccacaaacctgggtgtgagtgaagcttcgaggacaagctctttccacctcaaagcactctaactaatcacaagatcggcagcccctatgttacaacaatgtgcacaactactttataacgcaagcgatcctaactggattgtcacgagagacggaaaatggaattcattgggggcaaatgcttaaccgaatatcgcaggagttggcggcgggtctgggagaacgagaagagtaagcaacgctgttgtacgtaattatgtagtttggtacctcaacctgatgacatgcatttgaagggtattgatgctgacggaaggtgtcaagttcagcggcataacggcc

SEQ ID NO: 4615 - DNA, 1612 bp, Spizellomyces punctatus
  source 1..1612: mol_type = other DNA
caccaacgggctcctcttttacctttggagctgcggcccctccccagaacggattcagctttggagcttcccaacctggggcattgttttcgatgggtgctgggggaacacaggcgaatacacagggcggatcggctgggcgaaagattaaggcacccagaactgtcaggaggaaataggagacgaattaatctgactggtgtgcagtttagattagtgagacgagaggattagtaaaattgggttgcaaacacttctgtcggttctaattatatcatacccatcgcattttgtcctctgtggtatgccttgacaccatttcgcatcgcttcttttatttcttttatttacgaacgcaggaaagtgtttttcccgtacaatgctaaatgggtaatgactttaagtgtccttgccgacaggggtcataagtatcgcagcatcgcccttccaaatcatatagtggaggtgatggaaaatggcactaagactcattattatccggattaatccggttaatcatatcgcataatcagcacccccatctatcgcccaaagcggttgtggcatgcatgtaatgttgtttttttttaaactgcggtgaggcgcatgccaaaggtctataaaatgggggccttttgtctcttccctcttgtttctttatccctcgactctcaaagcatctgtgcaactcttctcatcgcgactctcaagtccatcatcatgagaatactgctctggtgccgaggacctcgccctcccgacaataacaacataaccccttgcaaacactgctgctactatgctgcaacgatcacaggtatgcattatctttgtattttcccacgcgtattccgagtctaattctggtttaattagtatctgaacatcctccgactaagaatttcggaatcaagggcttagtaggatttctctcgtgtggtgggcttagttacccggttagaacaaccgtaatgtattgcatgtgtaattgggcctagtagtagttggttggttgtaaggagggaattacttggcttttccgggttggttgtcgccagtttattccctggtgtagtagctagtgccattttctgtcacctctacactataaacggacaagaaagcgatcactcaataatgatgattgtcaaccaaatggacttaaatttctaactgataagtgatctataacaaatgagatgtaagcgcccagcaatacttaaatgagctctcgtagtaaacaacgtgataacaatggaactgaaatgattgtctagaaagacggaaagtgctacacaccagtttgtgaagcacaatctgctctttgagcagtgtccttcatgcgatggataggcgcatcggaagtctcctcactgattctgtctaatccttcattacttgagctgtgtgagatttgaatatgtcccaaaatctgcacaagttagttttggattgtcgaaactccccttctgtgaaactggcatggtgaaaggccctccttcttcatcagtagtgcatcaaactgaaagcattggagaggttctccatgccacattcccgcgcaaatgcgcaaagattgtgtcgatacatgaacaagactgacacaccggag

SEQ ID NO: 4616 - protein, 130 aa, Spizellomyces punctatus
MHKVRKSRVGFVPRWIKAVFGKQASKSTLDDSDSVHHLPTITAVAIVHVKIEDIEQAGFRPRPKLETIPEVYEKRKSDRPNCDRQDSGVEMMTTDYFAKRSPSLSLLKSHVRSNKTRGTLRSRSCTYSKV

SEQ ID NO: 4617 - DNA, 560 bp, Spizellomyces punctatus
  source 1..560: mol_type = other DNA
atgagagtgctgctgtaatcaagggatttcacattccaccatgatcagcaatctttttccatgcgtctccgcccgtttccgtgaaaaagggatttaaaatgtaatactgatcacgattccttctcatgcgacaacggatcagccgcctacttccgatttgcttccaaattacctttgaaattattgttcgatggagttgctgggaacagtgtcattcgaaaatgtcctgacaggtctaggtttgtcgcgctttaaattaagtcattcactagtgtggtccacccctgacggcggtccaggccaaggaaaacttctatgcatcctgcatgttatcctgcatgttaaaagcttgaagccttgattcctttttcctgtatcatgcacaaagtacggaaatctcgtgtcggcttcgtgccccgttggatcaaggcagtttttgggaaacaagcgtcaaagtccaccctcgacgatagcgattctgtacatcaccttccaaccatcactgccgtcgccattgtacatgtaaaaatagaggatattgaacaagccggtttccggcc

SEQ ID NO: 4618 - protein, 743 aa, Spizellomyces punctatus
MYSIVILILVALGFLVLGLLQYFGDFRKLPWYALLVAFLAWLFPFSLPLILPLDLASTHYRKCVEDANAIRCDRPLAYVSEGFLRTFWQIVYWTMFCLTWFTIPLMQTWIRAGDFRFGRRLWASLKDNLVYYGGLGAVGLVFLIYTLVVMHINKDTLLSMGIAAANAWGLLLSTVMMGYGLVEIPRTLWFDANTQWCLRYMEFTAPRVKESMVDAEADLYDVSREIAIASRKIELGDALRPLVDKLMEKCPLALEERNIDREEMVATVNEDYLISLHARIKRAVKVLDRTQAQYQFLLQKAFLYQDVIENYRNKDRKFQSTLVTVSEDRFKDIKLRSYWWYYVWIRPIALRFLSIIAVLASLAVIWSESTFQVESVTLSVPAVILKSPYIGYVALELVAMGFILYMCVCAYSTLFKIKFFDYYLVPEHHTDEGSLLFIGSYLCKLTFPLCYNFLNMVTDDETMFVTYQGKAVSLTPLLGEGYNKWLPEIVLIFALLTLFNMHGRLLRLFKIKHYSYYEAIAPNDADIEEGRQIIEQARAVEERKRTGGTIDSRFSNDITSTSRQSRIGSTRTAGTAKDLLAKYKSGGRFGRGAPSNDINSTVNVPAGTADGTNAGGLWTFKKANPFKGFGLSALKSPAAPTDGGGKFQRLEEDLESVGGREGFGSRESLKTNNQTKSGRKFGVVSGTSTASKTDSGGGGWGGLGSNWSDENKTAGSAGAQKTPPSSRKAGPAKAPTKNIFDGV

SEQ ID NO: 4619 - DNA, 737 bp, Spizellomyces punctatus
  source 1..737: mol_type = other DNA
caccgctgaacaagcacctctcactggtttttagacccattatcggaagtgcgtggaggatgcgaatgcgatcagatgtgaccggccgttagcctatgtctccgaaggatttttgcgcaccttttggcagattgtgtattggacaatgttctgtttgacatggtaacttcgttcagtgtgcgcaaagggctccatctggagtacagtaaactcatgagaaattgcatcaggttcaccattcctcttatgcaaacgtggatccgtgcgggcgactttcgtttcggccgtcggctctgggcatcactgaaagataatctggtgtactacggtggcctcggagctgttggactggtgttcctcatctacacattagttgtgatgcatatcaataagtaggtgcttcgaaaatcactgcaagcgtcgcacaaccatctgatgccacatgtccgtagagatacacttctttcaatgggcattgctgcggcgaatgcatggggtctgcttttaagcaccgttatgatgggatatggcttggtggagattccacggacgctatggtttgatgcgaacacccagtggtgcctgagatacatggagtttacggcgccgcgagtgaaggagagtatggtggacgctgaagccgatctgtatgacgtttccagggtattactattgtcttttccggattgatgcgtcgtacgaaatatggtcgttaatatctatcgattaggaaattg

SEQ ID NO: 4620 - DNA, 1605 bp, Spizellomyces punctatus
  source 1..1605: mol_type = other DNA
acgacccaaattggaaacgatacccgaggtttacgagaaacgaaaatcggatcgtccgaattgtgaccgccaggacagtggagtagagatgatgacgacggattactttgcaaaaaggtccccgtccctttccctgttaaagagccatgttcgatcgaataaaacaagaggcacgctccgcagcaggtcgtgcacctattccaaggtataagtaaatcgacctgaacagaggcttgctcagaacgtctgctacaatctggatattttctggaaaacattgaagtgagaaaagggagcccattaattgtgttgtatagtcatggacgtcatggaatattgtatattctcttagctagcaatgatcttggaagatgtcatatacatgggtatagcatgagctggagctgtataaagggccatcatcagttggggagtcatatactggagcagcagaataaacactggagcatcgttaagaaataaaagcttgtatctgagtttctatatcactttttactgcgacctccgtcgaagaacccctcatcaacatagtgtggaggtgattgaaaatggcactaggacccattattatccggattaatccggttaatcatatcgcataatcagaacccccatctattgctcaaagcggtgtggcatgctaatgtaactttttttttaaactgcggtgaggcgcatgccaaaggtctataaaaggggggccttttccctctttcctcttttcccatcctcgactcaaagcatccgcccaacaagtctcagtccatcatgagaatattgctctggtgccgaggacctcgtccgcccgacaacgacaacaacataaccccttgcaaacactgctactactatgctgcaacgatcgcaggtatgcattatctttgtattttcccacgcgtattccgagtctaattctggtttaattagtatctgaacatcctccgactaaagaatttcggaatcaagggcttagtaggatttctctcgtggtggtgggcgctagttacccggttagaacaaccgtaatgtattgcatgtgtaattgggcctagtagtagttggttggttgtaaggagggaattacttggcttttccgaaccagttatcgctggtttattccctggtgtagtagctagtgccagtttctgtcacctaatacactaagcgcgtgagacggggctttgcttaccctttgacccacagcaccgcttcgcccgcaatcgttttgctttcaacttccgacccgcccaaacactaccaagacattgctataccgtcgcttctcacaatcgatcggagagggctcctctccaacacaccctcctgactgtcaattgcgcctaaaactccgctgaagagaaacatcatgtacagcattgtcattctcatcctcgtcgcactaggatttctcgtcctggggcttttacaatactttggagactttcgaaaactgccatggtacgcactacttgtggcctttttggcgtggcttttcccattctctttacccctcatactaccgttggacttggcatcggtgagttgcattgggaacttgcttttgagtagcatttcaatcaggtc

SEQ ID NO: 4621 - protein, 228 aa, Spizellomyces punctatus
MSGTVRDYIESRKKFGMTWDDFSALKAKKEDGAFTEASMIKYRKQLDEERERKLKARFDENKKDKKSKKGKDREKEKKRKRKRKDKEKGKERRKKSPKHDAVSDESTDRAEQPVVEKADSEEKEDGEIDESSSEPEKSQVRKDRRPKPSRRRSRKGSALDSEDSRTSSSEEDSLSESSSSTSDSGGGKERSKRKRRKSKGESDRSQRKKKREASGPVRLSDFLAQDSD

SEQ ID NO: 4622 - DNA, 475 bp, Spizellomyces punctatus
  source 1..475: mol_type = other DNA
ttcggtgagtttcacttttagagcaatacccatgtagcgctggtagagactgaggcgatgtgtgctagggactacatagagagcagaaagaagtttggcatgacatggtatgtcacgtttgcttggtccaacggagacacgatttaagtgacattcgcgcaattggttcgcatcaagggatgactttagcgcattgaaagcaaagaaagaggacggggcttttactgaggcgtctatgataaaggtccgcagagaatctggtatttttaagtaaccgagatcatgaccctcggatcattagtaccgaaagcagctcgatgaagagcgcgaacgcaagcttaaagcgcgattcgacgagaacaaaaaagataagaaatctaaaaagggaaaagatcgagagaaagaaaagaaacgaaagcgcaagcgaaaggacaaagaaaaaggcaaagagcgcaggaaaaaaagtcctaaacac

SEQ ID NO: 4623 - DNA, 1118 bp, Spizellomyces punctatus
  source 1..1118: mol_type = other DNA
tgaatttgggttatgggtttgcgaggttagtgacatgcgaggagtttgttgggatactcgataagatcaggggacgagaaccttgagtttgacgttcaatgcgttgctgggaagtcttgttctctacttgtctatgtgccctttgcttgttggctccgttcctccgatgtacatatatccaacttctctttgcgtccagaaaaaataagcttgcacacgtgcccaagatatcaaggcctaactctgggtagccacagtaacaaaccaagacatgtgtcctgccatatcagtccaaagtcaaaggaggatggtcaaaattactcgacgccggtcagggcgcttcagctgtgcagtatgtggaaaccgatcatgttcgtagacaaacaatatacgcacaatgaagaaagtcgcaaatagcgcaagcaatttgagatgcaaaaacgtagactgcacatgattggccgaatgctaaacccgacctacttatgcaccttcaactctcaccatcgcatcatctgtctccaactcgacctccccaacctgatctccgtcctcatttctaacctctgcggtaaactttgcttttatatagaatatttccggcaatgttatgtcctccggattgaggatccgatataattcatccaagtctgcgctagcctctaccacactctcccccggtgggattgtcacccattgctggctgctaaccttgtctctgaacggacagtcttgaccatcgttatcataaacggaccatacgtcacttgttgtccacggcgttgagatcgagtaagatttggacgatgggttgacgataaagatagagacttttgctacgagaggtgttttgggtgtccaaagagatgttacgttaagtataggtttgtgaatgctgagattcgtcccatcatcgatgcggagacgctgagttgtggtttcgatggatggcatattgtcgcttgatcaaactgtctgatctttgtggctaaccgcacgactggaagccaacgttcttgtagggagcaacacacacgttattggtgatgacgtcctgcagagacgaggcctgcgcgttttgacccacgttggctatcctcctcctttgggcgccgaac

SEQ ID NO: 4624 - DNA, 1475 bp, Spizellomyces punctatus
  source 1..1475: mol_type = other DNA
gacgcagtgtctgatgaaagtaccgatagagctgagcagccagtagttgagaaagcagatagtgaagagaaggaagatggagagatcgatgagtccagcagcgaaccggaaaaatcacaagttcggaaagatcggagaccaaaaccttcaagaagacggagccggaaaggaagtgctttagacagcgaagattctagaacaagcagcagtgaagaggacagcttgagcgaaagtagcagttctacaagcgactctgggggtgggaaggaaagatcaaaggtacgattgaacatctacgcatgtacgtttgaccctagcattcatatcaattgctgtaacagcggaaaagacgtaaatcaaagggagaaagtgacaggtcccaacggaaaaagaagagggaagcgtcgggacccgtgcgactatcagactttctggcgcaagacagcgattaaaggactcatgaagaaaattctttgtagaaatttggtacatgattgtatatactggtgcgatgctatctaaacaagcattatcaaactcgagcgattgtcatctgcattacgctccgtataacttacaagcagacaacataggtgtggaggtgattgaaaatggcactaggacccattgttttccggattaatccggttaatcatatcgcataatcagaacccccatctattgctcagattggtgtggcatgcatgtaatgctttttttttttttttttttaaaaactataaaaggggacctgctccctcttccctcttgtttctttaccctcgacttgcaagcatctgcgcaacattcaagcaacactctcaagtccatcatgagaatgccgctctggtgccgaggacctcgtccgcccgacagcaacagcaatcagaaccccttgcaaacgctgctactactatgctgcaacgatcgcaggtatgcattatctttgtattttcccacgcggattatccagtctaattattctgatctaccttagtatctgaacatcctccgaccaaagaatctcggaatcaagggcttagtaagatttctctcgtggtggtgggcttagttacccggttagaacaaccgtaatgtattgcatgtgtaattgggcctagtagcagtagttggttgtaaggagggaattacttggcttttccgggctggttgtcgccagtctattccctggtgtattgtgtgtgacatttgtttttgccaatacactatgatgcatttcacgacacacctctccatcaaaagttgacagagaacggagtgaacacagttgttatcgctggtgagcgtcttctattccgattaaagaggcagtagacctaagttttggtgaagggaccatgaccaatctatgctgcgaaacaacggcacgatctgcttttgtccgaggttttgatgtatggttttggctgatggaaccgcatgcgggaatcaaagcatgcacgatgctactcttt

SEQ ID NO: 4625 - DNA, 242 bp, Spizellomyces punctatus
  source 1..242: mol_type = other DNA
tgctccggcgtttttatgcaacactagaacatactgaacgtgaaaaccgtgctttccctcagtcaagtttcggatggtggcttctacatgcacaggtcccgaaggggtatcttgtgtgaagattacttcgcccgtcacattaggctgcgtgtcgccttttagaacggcaatcgctgagaccattttgccgggtttcgttttgaaacaagtgcgctgtatgtaaacgtgaagacaagatggat

SEQ ID NO: 4626 - protein, 176 aa, Spizellomyces punctatus
MSAKKQVTQLSNSVLSLKFMHRADEAKVRQKLEEEQRRAQQEAQWVVGDFDRDELESVQFEYDNSYVSFMPNTFGRRSFGNFNKEVEKLSEEATQTARLALAHENETRDSVSDMDLAKHFKGIQQDKKRKRDKEEKNDAGSDWDDFKGRKATRFSHAATATDVEKRKDSKVFIKPE

SEQ ID NO: 4627 - DNA, 262 bp, Spizellomyces punctatus
  source 1..262: mol_type = other DNA
ttgataaacaccttactatcttttctcttctcaacatcagtcgccgtcgcagcatgtgagaaccttgtggcttttcgccctttaaaatcatcccaatccgaccctgcatcgttcttttcttctttgtctcgttttcgcttcttatcttgttgaatgcctttaaagtgctttgctaagtccatatctgagacggagtcccgggtttcattttcatgggctaacgctaggcgagcagtttgtgtagcttcttctgagagtttct

SEQ ID NO: 4628 - DNA, 1610 bp, Spizellomyces punctatus
  source 1..1610: mol_type = other DNA
ttgtgatggggtttacttgggaccgatgtgtgggggtgaacgtttccttttgaggtgtcagcttgagctgtatcgatatgacgacaaaacgtttcgttgcgtcaaaacgaaccctgcaagagcgatttatgcccttggagtttcagcacttaagggaccccccacatactcttccaaaagactgactgatccatttttagatattcgtaatgcagcacagtacatcagttaagactataagtttcaaggtttcctgcctcatctgaacagcttgcgcgatacggtgcacagtttcatacgggaaaatgtagcggtgtgcagtctatggccaatcgtcaagccttcattaagcatagaagagatcatcttttagcattgcgagttatgattgagattcgatttgcttctggacatgttgactagtcggaggaaaacgaagctgaaagaccaaagcgactatcaatcgcgtcgtacccgtcgattacgcaatgcaacttttcggacagtgtccattgtcccgtgacttttaacatagtatggaggtgattgaaaatggcactaagacccattattatccggataatccggttaatcatatcgcataatcagaacccccatcattgctcaaagcggtgaggaggcatggatgctaatgttctccaaactgtagtgtggcatgctaatgtaatgtttttcttttttaaactgcagtgaggtgcatgcggaaggtctataaaaagggggccttctgtctctttcccctttcctctttacccatcctcgactctcgaagcatctgcgcaacgctcacccagcactctcaagtccatcatcatgagaatgccgctctggtgtcgaggacctcgccctcccgacaaaaacaacataaccccttgcaaacgctgctactactatattgctacgatcgcaggtatgcattatctttgtattttcccatgcatattcccagtctaattcccgttaccttagtatctgaacatcctccgactaaagaatttcggaatcaagggcttagtaggatttctctcgtggtggtgggcttagttacccggttagaaccaaccgttacgtattgcgtgtgtcattgggcctagtagtagttggttggttgtaaggagttggttagttagttagcttttccgaaccagttgtcgccggttcattccctggtgtagtagctagtgccagtttctgtcacctctacactattggcccgcacatttgtattgaacaggcaatactgtacagcattcccacaaaccctagaatattgtctccaagcggcccattccacgcacatcagggttctaaaccagcataaattactataatacaaatgatatataacgagcctctaacgcggtcatactacacctcgtagggtagatgaaaagcaaaagcagaggtataaggccaggaaagaaactcaacctgcctttcctgttcatgcgaaactactgtttttgtccgtacttgcatttttcgggcgatggcatcaacccggaacgatgcctggcacgaaaaccgcagatggctcaacattcttacctaaggttcaaaaaacccaatccttcccatctcattctggc

SEQ ID NO: 4629 - DNA, 1301 bp, Spizellomyces punctatus
  source 1..1301: mol_type = other DNA
ttctagtatttcatctgaaacgcttttccaatgccgggcgcggataccgtagtatgatgagcgataaaatagactcatatgtagacgcgcctatacaaggtcttgacctcaccaaggtggtggttggcaaacagcctgcccgcaaatggcggtcacgtggatcgttgccagaagagaacaaggaaaagcccgcagaaaccgcgagggctcaacatgtcgaggtgggttcaggtggaagcgccctgacaagcgacggcgtgtttgcggacgaaatggacgtaggggaacccagtgtcaatctggcgcaatcggcagctgaagcctctgcagtgcgatcagaaaagtttgatgactccttacgggcttcggcatcgtcggaactggatcgcatggaggtgtctgaacgtgtcgattcagaaactatcgatacatcattagacaagcccctggtcgatgcagatgacgaggagttagaagctgcgtatcaagatgcgaaaacccggacgcccaaaccggaggaggcagaggggacaggcgcaccctgcgacgaagaacgcgaagggatcggatatttgtatgaacccgctacggattctgacgatgaggagtctctcgtctacgatttgttcgcggtgtcaaatcactatggggggctgggaggtggacactgtaagtggccagcacagaggcacagccgtaattacagattcttatgcgttcattccagatactgcctacgccaaaaatgctttggattcgcaatggtaccatttcgatgacagtcatgtcagcaaaactgacgaatccgatgttatggttagtaagtgctatatacatgtacgtctctgccgttctaactggtttaattatagacgtctgcggcgtacctcctcttctatcaacgccgacacaaaggcaacaaaacggatcttaccaaagttctggaagaagttcaaaaacgcgccgctgcggcggaagcagccgcagccgccgccagagccgaacaatcttcgttgagctcttttttacgtacgccttccgctccatttcctatgccgctgggcacccacttatcacagccgtctggaacgggcttggtctcgccgattactacatcagccgaaacgacgcgcaacaattcgcctcaggtgtcacccgccgggtcgctgggtggctcggctattagtagtgataatgaagagtccgagacggttaatcgggagcggaaggcgagaacaacaccgggtgtgtaccttgatcacggcccatgtcttccatcttcagagcgtacgccttttggt

SEQ ID NO: 4630 - protein, 487 aa, Spizellomyces punctatus
MLSSPVHATQSQRRPSLGDVLSNVFKRRGNHEVEAEPARVESAYPATPIRRDRRPSLSSVTGKEPRSNAVSQGSRQAPPRERQVRHRRHRPRALEPDPLDLPDMVEDFLAILDEDEIAQEPYLRGYFTALLSRYARWQARGRSKAACFEAACLGGARYLEEIGRAPSDRTNALDAALARALAGLVVDAVEPEMAMEWDGPVREKAVAIVTDEFLAKAPHERVAGPAKRRVTKSKSGYGGVHNVALHVVPDWENDDVPPLQYDMGRRGSDASMQEFPPRKGSVDKVQNLRRTSRENAHDHARSDGLERLSRVRKLSREETQEGARRLRPGSVERIANGEEGEYYPRRSSSLERGPVTRYRKGSIDGDLQTPGRKSSRDETTVTYLSDAVPIRNVTRRGSRDEGPPPPAVRSTTRNIPWEPIAEDPSSFSVAPSSPIPPRHDSRVAMKLQQQALKPGQVASPQQRRGSESSRGESLGWNVAERGYVRKR

SEQ ID NO: 4631 - DNA, 410 bp, Spizellomyces punctatus
  source 1..410: mol_type = other DNA
tttcgtcacggctcgacttacgtccaggagtttgcaggtcgccatctatgctccccttccggtaccgtgtaacgggaccacgttccaggctgctggatcggcgaggatagtattccccctcttctccattcgcaattctttccacgctaccagggcgcaagcggcgcgcgccttcttgtgtctcctcccgactcaacttgcgcacacgcgataaccgttctaagccatctgaccttgcatggtcatgcgcattttcccggctggttcttcggagattctgcactttgtcgacacttccttttcttggcgggaactcttgcatactagcatcgctcccgcgtcggcccatgtcgtactgcagtggtggcacatcgtcattctcccaatctggaacaacatgcagagccaca

SEQ ID NO: 4632 - DNA, 1605 bp, Spizellomyces punctatus
  source 1..1605: mol_type = other DNA
ccaatccgggagtcaagccctgcggcttctttttctgtgggttttgactggggccagcgacaatcttctgtgaatgacggaggagatacgtttttagacgcaagagggtcccggtcgcccactgagcacggctggggatggccatcaccagacgccaggccctcttttgggtggagcgataacgccctggaacaagatgagacagatgcgtcttatcagacactgccattgatggatgcagaggctgacagactagaggcaacagatgttgagattgaggatttggtttctgatgaggctgacgagtctagaaagccacagactgtgaatggggatgcgaacggtcaagatgcagaggttaatgggggctacgaacaagaggagcagtcaaggggaaccgaaggaggcgaaagcaatttaaaaacatcgttacagcacgttgagtatgataatcccggcactatatcacaggcggcaagtggtgacgaataagagcgtgaatgaatgtatttagagatgtgtgccattagcattatacatagtgtggaggtgattgaaaatggcactagaactcattattatccggattaatccggtcagtcatatcgcataatcagaaccccctctatcgctcagattggtgtggcatgcatgtaattttttttttaaactgcggtgaggcgcatgccaaaggtctataaaagggggaccttctgtctctttcccctttcctctttacccatcctcgactcgaagcatctgtgcaattcttctcatcacgactgtcggtcaaatcatgagaatacagatgtggtggtgccgaggacctcgcccacccgactacaacaacaacataaccccttgcaacgctgctactactatattgctacgatcgcaggtatatccatatgatttttcccacgcgcaaattacccagtctaattcccatttaccttagtatctgaacatcctccgactaaagaatttcggaatcaagggcttagtaggatttctctcgtgtggtgaacttagttaccccgttagaacaaccgtaatgtattgcatgtgtaattgggcctagtagtagttggttggttgtaaggagggaattacttggcttttccgaaccagttgtcgctggtttattccctggtgtagtagctagtgccaatttctgtcacctctacactatatactggcttttgaccaaagtctgatttcccaaaataatgtttcaaatatacaatgcggaaaaacttgggattcgcgaatgtcactatcgtttgcggacataccctcgctccgcaacgttccatcctaaagattcaccacgggatgattccgatcctcgtcgctgctgcggcgacgctacttgcccaggttttagtgcctgttgctgcaatttcatggcaacccgactgtcatgacgtgggggaattggcgaagaaggtgcgacgctgaaagatgagggatcctcggcaatgggctcccagggtatgttcctggttgtgcttcgaacggcgggaggaggagggccttcgtccctacttcctcgtcgcgtaacgtttcgaatgggcactgcatcggacaagtaggtcacggtag

SEQ ID NO: 4633 - DNA, 1027 bp, Spizellomyces punctatus
  source 1..1027: mol_type = other DNA
cttaattccagatttttcttcgataaatttcagaaaagagtccaagtcccgaccaccattgtaatcttcaggtgtctttgagccttttgggaaccatttgatggttgggtatcccctgacttcaaatcgggatcccaattccttatgcgcatccgcatcaacctttgcaataacaatgtcgttcttcgcgttggcgaaagccgcacccagctcttcatatatctattccgagaaagacgtcagaccaatgctcagcaaatccttttgcttgtttgaacctaccggtgccaatgactgtcattcaaaaagccaatgaatcgtgagtattgatattgatcggaaaaacacacagcagctcacgcacctctgaaattcaatagtgacggacaaggggtagaatatggacgcatcagtaaatcccaatcaaaactaaacggtgaatgaattgagatatgccatgatactaactgcaatgtcctgtgaagacaacatgagattagtgacccttagcagcgagatttagcaagagatcagtaaacacataccacacctggatgaaattgaggaggaaagagaaaaagttgaaagtcagtagccatttccatgcgaaaagcaagcatgaagtcatgaacgaaccatggggcgtagaattctacgagggcgggtttactcccatcaacatgctggtagaatgagcacgagatggttcagaatcagcgcgttttcagatagttgttgcagggtattaaccttgtcaaaatcactaggtgtcaacgccaaaacgtgctcggagtcgcactgcacgaacgaagcagtgcccaacagagcaagtacacatagtaggaaggagaacgaggttttttttgtacccatcttcgtactgtttcggttccggatgaaagacgatggctcgtaggttcagtatttgagtgtgtattagttagcgtgctgtcgcgctctgattggcccaatggtggttccatccggctgaatgattgtcaagtgcctcaccagtgtggctaataga

SEQ ID NO: 4634 - DNA, 1168 bp, Spizellomyces punctatus
  source 1..1168: mol_type = other DNA
aattggggattttttgtagttgacgtccaaggttctcgcaggcgattgttttaacctgcgtcgaaatcaacgggctattgttgatgatattctgactatgtgccaagattcgctgatagatggcatccgagttcttgcgatctcaacgattgtcccaagagtttcaccgcctagtccatgcctatcatccagaatttgacagtttgtttatcgacacgacgtagaaggtgattccttgcctctcttccaccccttagatacgcttcgagtccagtttcaacttgtcactacatcaatgtagagtatcgctttccagccaatatcccaacataaggattccatacggtttccatttaataagaggagaacgtcgtctggcgatggaaggggtacaaaactattggcgcggagataagaatggtcatatttagactcgaaacgaacttccgaatcttctttccagtcctccattccgctcactacctgttgaagtcggatacagatttcaaagggctctgcatcatcatccatcatcgcgtgaacaacttttttccgggatggttgttcattctcgttgtagttgcgtttcgaggatctgttttgcagtgtccttcagttggaagttgacacgagaaggaatgcagtgcttcgcctaggaggacagacaactgaagaacctaaatgcagacgtctcagaatgtcttatgttgctgatatttcggcttttctaaactgtctgctgaaaagtaacatgcaaagcacggattacttcacagtgcgatttgtatggaaggagtcagccacaaactacagtacagtacatttgctgcgtaagctggtttgatcagaacataccatgtgcccctttttcgtgctgaattaggtggaaagataatagaaacatagaccgactattttcggtcgatatactacttgcaataagttcaataaactagcacagaatacaataaaaataaaataaatgagaaacacacaaatacacaacgacaagtgactagtctaagttagccgctgccaactacctcaaccgcggtataccactaacactaaaggctcctaattaataatattaaaacaccataactcgtcatcattaatgcgccgttgtaccgttggctgcagcagcctcgggtgcaggtcggctcac

SEQ ID NO: 4635 - DNA, 1536 bp, Spizellomyces punctatus
  source 1..1536: mol_type = other DNA
atgttcatcttgtacagtacagcatgtgcataaaagtagagagaatcacgtgtgcacgtgatgctctgccaatctataccccagtggtcgacgtccaagactcttgctggtgcggcggcatggcgcttgattcacacaagcgtgctgccatcgttggaatgcgcaagctttatcttcaaattacctctttaaacttgtagaatctatgcctagacgtatgcaggctgtggtagatgccaatggatggtggacgcggtattaagaatagactagaattctagaccaccacgtgaatcacgtgattctctctacttttatgcacatgctgtatcttacaatctaatcaaacgaacatagtgtggaggtgattgaaaatggcactaggaccaatattatccggattaatccggttaatcatatcgcataatcagaacccccatctatcgctcagattggtgtggcatgcatgtaatgtttttttttaaactgcggtgaggtgcatgcggaaggtctataaaaggggacctgctctctctccccttcctcaccagttcctcgactcttgaagcatctgcccaacgcacaagcaactctcaagtccatcatgagaatgccgctctggtgccgaggacctcgccctcctgacaaaaacaacataaccccttgcaaacgctgctactactatgctgcaacaatcgcaggtatgcattatctttgtattttcccacgcgtattccgagtctaattctggtttaattagtatctgaacatcctctgactaaagaatttcggaatcaagggcttagtaggattctctcgtgtggtgggcttagttacccggttagaacaaccgtaatgtattgcatatgtcattgggcctagtggtagttagttggttgtaaggagggaattactcggcccttgcaaacactgctactactatattgctacgatcgcaggtatatctttatgattttttcccacgcgcgtattcccagtctaattcccattaccttaagtatctgaaaacatcctctgactaaagaatttcggaatcaagggcttagtaggatttctctcgtgtggtgggcttagttacccggttagaacaaccgtaatgtattgcatatgtcattgggcctagtggtagttagttggttgtaaggagggaattactcggcttttccgagccagtttacgctggttcattccctggtgtagtagctagttccggtttctgtcacctaatacactaaacaattggcataaatcaaggcgttgccggcgatctccacatatccagcctaatcttcttcgatggttcggtttgctgcagcgaatggtacatctcgcggtattttgcttagcccctgccctggccgaagcaccacatctgaacaaacattggcactcgctgccattatttggactattctagtaaggagatagtattaaattgtttaattcgtgcgagagtgatcaagacatacatacccagagtaaagaagaacaattcgaatacaacaaaatattcaa

SEQ ID NO: 4636 - protein, 71 aa, Spizellomyces punctatus
MTTEHHPETPTIQQPVVGWTDTIFLPFDIDYSSHKKQLAEIAEAAKVMMGYDAKEDVLRVTGDTEHEIRDW

SEQ ID NO: 4637 - protein, 210 aa, Spizellomyces punctatus
MSYLDTTNPDFFKRQRKKLVIVGDGACGKTSLLMVQSGQEFPTEYVPTIFENFITQIHAAKNKVYEMSLWDTAGQEEYDRLRPLSYPDTDVVLLCFSLIHREGFENIRDKWYPETNHFLHDVPRILVGNQKDLRDNATDEERAAFARRFGWPEMQRPITYEEGVKLAHEIGAAKYFETSAKTKEGIYELFVGAGKVAYKPKRRVRQCYFL

SEQ ID NO: 4638 - DNA, 3805 bp, Spizellomyces punctatus
  source 1..3805: mol_type = other DNA
tttcaagggagcacatcatttacagagggcatatctgctaagaaatatccgacataccaggtaaattgctcacggacgcgcgatgctaaatgggagacccaagtaaaaagttgatgcgttgcaaacagatttaccaaaagacaacctcacgacttgtacccatgtggcctggcaaggatgtcgatcaacaagtaaaagaagagcaagacaaacgaaaatagtcttctgagaatgcttttgagatttgaccaggtgtacaaatgtatatttacgatggatgtaacgccgcaatgaaatctgaacgtcggagggtgatcaagctgtaatatcgttacaaactatacacacagacattgctaaacgaatacaaacaatgcaagagcctttcgatgcaacacacatgaagctacgatatttccatttcagtactgtcctgcctctcaagcgttgtttccaaaaaccttgtaaagaccctccgctgcaagcatttctcgcggctgaccccaatgtccaggatgctgacctttgttgagcaatggtttgtcccgtttgcgctgtttggaattctgtcgatgatggaaaaaggcgttcatacggtctcgactaacgaatatcatgaatagaacgcagtggcttcttttagttccaataaacaaactcggattacgctggatttttcgggctgtgggcagcattttcttaccagtcacgtatctcatgctctgtatcccctgtaactctcaaaacgtcttcttttgcatcgtagcccatcatgactttggccgcttctgcaatttcggctaattgtttcttatgggaactatagtcgatgtcaaaaggaagaaagatcgtatctgtccaaccaaccactggttgctggatggtaggtgtttcgggatgatgttcggtggtcattgttggtcaatccggacacgatagagtaagtcacaggcggatcatttgaagatgcttgctgatcatcaattaccacaaactatctgaaggaagcttttcagttgattttcctggggtcaagcctgcctgtggcgttctggtgtgagctgcatattggtattttatatgcttttttacaattgcagaggatacatgacccagattaacaaaccataaagggagatattcaaatatttacatggtgactgtccaaccttctaggaatgtccaagttctactcttggtttgaggtcaggtacattgtaagctgcaagcaccctcacaccccctacatcttcggtcaaacatttatggatttgctggtcgagcccgataaacttgttgctccccacaccgtgcatattgaaggtgattgaaaatggttaatcatatcgcataatcagaacccccatctattgctcagattggtgtggcatgcatgtaatgttttttttttttttttaaactgcggtgaggcgcatgccgaaggtctatacaaggggacctgctccctcttccctcttgtttctttatctctcgactctcgaagcatctgcccaacgttcaagcaacactctcaagtccatcatgagaatgccgctctggtgccgaggacctcgccctcccgactacaacaacaacataaccccttgcaaacgctgctactactatactgcaacgatcgcaggtatgcattatctttgtattttcccacgcggattagttacccggttagaacaaccgtaatgtattgcatgtgtaattgggcctagtggtagttggttggtaaggagggaattacttggcttttccgaaccagttgtcgctggtttattccctggtgtagtagctagtgccattttctgtcacctctacactattgaaggtataggccatctcgaatacaacgatcccgccagctctcttcaatcattggtctgggcagtgtatgggctctggagcatgttacaaaactctcaaaacctctgttaatggtccgacttgtgttcttacatgcaatatatattatataatatctttcaacctttgaagcggggcgctgcgttgaaaataaccagctaaaggaaataacattgtcgaacccgtctctttggtttgtaagccacctttcctgccccaacaaaaagttcgtatatgccttcctttgtctttgcagacgtctcaaagtatttcgcagcgccgatttcgtgtgctagtttgacaccttcttcgtaagtaatgggtcgctgcatttccggccacccgaatcgtcgggcaaaggcggcgcgttcttcgtctgtggcattatctcgcaggtctttttggttgccgacgaggattcggggaacgtcatgcagaaagtggtttgtttctgggtaccactgtatgatgatggaagaaaagagtgatgagccaccgtagagaggtttccattggaaaaccccaaaaagatgggatcatttaccttgtcccggatgttttcaaacccttcgcggtgaatcaatgaaaagcacaacaaaacgacatcggtatcagggtagctcaatggtcgcaatcgatcatattcctcttgtccagcagtgtcccacaagctcatttcgtatactttattcttggccgcgtggatctgagtgataaagttttcgaaaatggtcgggacgtattcggtagggaactcttggccggattgcaccatgagtagagaggtcttgccacaagctccgtccccgacaataaccagctttttgcgctgtcgcttgaaaaagtctggattagtcgtgtccagataagacatggtgacgtgcgggggcttgaaaggcggtctaatgcagcgcaataattgacggtgatcgcaacaagaaaaaagtagactggactgactgcagaaaggagcaggcttaccatactttatgtctctgagtgttagatttaccgtcattaccctgagggtttccaatgggcccgcgtgtgcaccaacattcgatcgcgcagaatatacaaatgccccatgggtcaaataagggtcgggagagacagttgataacagttccgaactagataaagctgtgtgtgaatcatgtttatacaagagcgcatgggacagtggatttgttctggtgtatgccgacagagttttcattgcagattcaaaacagccagtccatctggcattcatcagtccattaccatgatacgattcaaacaaaaacctttaaaaatagcctaagaaataagccatgtctattggaagtaatctgggagtccgcaaatagtcgcaatgcttgattccgcagttaatcccccgccgtcaggcagattggtttggcataaacatccctatcttacgtgcacgcactggactgcggcgacaagtgaaagaaatatctccggatgccgtttcaatgcatggataaaaagtttggacatcaaaagataaatcccagccagcaggttcgtcttccctcgctgatcaaaggctcttccaaaggaaaagacattggcaaaacgttcttgtttgcaaaggctatttgtgagcatcaaagcggctgtggatccaaagtctgcacgggaaataccgcgccggtttctctagtttgtcaacatatatcatatttttcatccgatttcatcctttatcgcaggcccttcccccgaagaggatgccatcatcacccgaaggctccggcagtcgttgctccttccatttctggcgcgcgcaaacgatcagtcccaggcgcccacctcaaagaggttagtacgttgcattactgcaacggcctttaaagttatccggttatgacttttcgaccgagttgagtttagcgccaagttcccagggcgggctcgagtt

SEQ ID NO: 4639 - protein, 1543 aa, Spizellomyces punctatus
MAGGSAARANRQKKGKRNANGKRGNKDRKTGDRRGGKDVERRGGGFRGVELVWNPVTGEVVEIGKKQSAILKEKEKRQMARKWQQATKSKKEELPRLHLTRPVFKRLATILSNYHEAQKVLRQVEEGDDDDYEEDDEQDIDPGMEELIRDINGPRFYHDENKYNGESDEEDFQSDGSSEQSSLEDGEDAETNDSEDDVDEGFDYSDDESSTGETTTEDVGSGFEGTATQHRMIINAPTKLTRPPPSVGGREHDSMELPFSDTSVHADSISRAWLESLGFTTRHAVVALQRCNNDQLAALSYLYSQVVDSEFVLSSDCVATDPEFADEANALREQECKELESVYGKSFTRYTRRDGTLVWQITGIEVEVPGLTQSALHLALQLHHPKNTMYPFQAPVVVLDCSNKPEGIQAGLLSLAISLQMRARDHLGETVMDMLASALQTNEAQESLIAPSVRIRNIVAPGWDATGRSEQKRVLVIKGHREKEKEKITQGPKIRLHKGPRGGVPTMDMIRRAQEVAICLKEDQGTANLVTGIVGKVLTRGDHPRGIKVQLTDGRVGRVQALVERCITVEPRPQNSKDAPILSTRSAARDMTTPNRSGPPKAPDQSELIAPLQQMRINPSVVQKPMDSSSMPKGRVIPGKLRKPPLSAAEISLENEKLHKEFIAQQQRPQYKKMRSERETLPVWKWQQDIVNAVEENPVVVVEGETGCGKTTQVPQFLLDALICQKRGAQCKILVTQPRRISAIGVAERVAAERDESLGKTVGYQIRLENRMSDATRILFATTGILLRRLEGAGARSVSGFGAETLTDDHEGGIDDLTHIIVDEVHERSIESDFLLMVLRDLLLTQPRLKLVLMSATLNAELFQAYFGQAPRIHVPGRTFHVQVLYLEDALAKTGYQPEGSDYRRGHMRVRPTTTGNDDEKPDEELQFSALKKRYPHISDKTLEALKLVNVERIQYPLIALLVEWMSEMLLPGSSKRQPPGANTSFSGRGVSRGKRGHGTLRGGRRSENTLDRPLFNENVLAPNRGILIFLPGYAEIATLHELLRHNPQIRAATSNGKYLIPLHGDLPSAQQLNVFKRPEDGYVKVIIATNVAETSITVDDVVYVIDSGKMKETRFDPTKGMASLEECWVSRANALQRRGRAGRVTEGTCVHLFTSHMFENTLAAQQVPEMRRTPLEQLCLRIKVLPFLQGRIAQILAKVIEPPSHEAVQNAVLTLRTLQALTREETLTPLGFHLGRLPVDVRIGKLLILGSIFHCVDPVLTIAAAMSMKSPFVAPFEKREMADRKKAEFASGMSDQLTILNAYRQWQKVRSLGQEAERTFLRSNFLSWKVLGMIASVKRQLAELLSDIGFLDSSLPLQVRAMERAGGNISDGVVESIRPEANARGDDLRLVKAVLIAALYPNVIQTANSSKPAGEPQLKVRGGEEVFIHPSSVNYRKMFPTRFLVYHEKVKTSKVYIRDSSVVTPYALAFFGGNLTWDKRQKRLNMGDGWIAFRADPPTAGVIEGCRAAMDELLARKIQDPTLDISGEELIDAIVDIINMQN

SEQ ID NO: 4640 - DNA, 325 bp, Spizellomyces punctatus
  source 1..325: mol_type = other DNA
cgagttgtaaatccaagtgactccagccatgctcgactaatgctgtcggcgtgcacagatgtatcggaaaaaggcagttccatggagtcgtgttctcgcccgccaactgacggtggaggccttgtcaatttggtgggggcattgattatcatacgatgctgcgtcgctgtgccttcgaacccactacctacgtcttcagtggtggtttcgcctgtggagctttcatcatcactgtaatcaaatccttcatcgacgtcgtcttcactatcatttgtctcagcatcttccccatcctctaaagaagattgttcactactcccatcgc

SEQ ID NO: 4641 - protein, 313 aa, Spizellomyces punctatus
MDTSRKTSWQIAQPFVTGGLGGMIATAVIQPVDMVKVRMQLAGEGTKNIHPNPFRLAADIIRNEKFTSLYRGLSAGLLRQATYTTARMGLFNTFLSSAKEYNGNDKVTFSQRALAGLAAGGLGAIVGTPPDLALVRMQADGMLPAAKRANYTGVSNALTRIVREEGFFSLWNGAGPTVARAMALNLGMLTTYSHTKSELDRILGPGALSKFGSSAVAGFFASFMSLPFDFIKTRLQKQRPDVQGNMPYKGTIDCALKVIRNEGPLAFYRSFPVYYIRIAPHAMLTLLIADGLNSAVATLAAGSTRLRKEEQRV

SEQ ID NO: 4642 - DNA, 262 bp, Spizellomyces punctatus
  source 1..262: mol_type = other DNA
cggatatagtacacagggaaactctttaacagcgcgcaagcgttaatagtgacaagatcaaaaagattaggtgcaaagatactcaccctatagaacgccaaaggaccttcgttcctgattactttgagcgcgcaatcaatggtacccttgtaaggcatattcccctggacatcgggacgttgcttttgtaatcttgtcttgatgaaatcaaagggaagcgacatgaaagaagcaaagaatccagctacagcagaggagccaa

SEQ ID NO: 4643 - DNA, 1610 bp, Spizellomyces punctatus
  source 1..1610: mol_type = other DNA
tttgaaaatcctcctcgtccgactctccgttgtacttgttctcgtcgtggtagaaacgcggaccattgatatcccttatcaactcttccattccagggtcgatatcctgctcatcatcttcctcgtaatcatcgtcatcgccttcctccacttgtcttaggactttctgtgcctcatgataatttgataggatagtggccaaccttttaaatacggggcgggtcaaatggagtcgtggcaactcctcctttttggacttcgttgcttgctgccattttcgagccatttgacgtttctctttttctttcaagattgcactttgcttcttccctatttctactacctccccagtgacgggattccaaaccagctcgacacctcgaaaaccacctccccgacgctcgacatctttgccacctctccggtctccagtcttacgatccttattgcctctctttccattagcatttctcttccctttcttctgcctgttcgctcgagccgcgctccctccggccatttattccaatttcttaacgacgttggccaagattgcacattgcatactcaacataagcttgttggcatggcaacagcgtgcaatttaccgtcatgactcgccaacttcaatagtgtggaggtgattgaaaatggcactagaactcattattatccggattactccggttagtcatatcgcataatcagcaccccctctatcgctcaacacggtgtggcatgtattgtaatgttttttttttttaaactgcggtgaggcgcatgcagaaggtctataaaaggggggcctttgctgtctcttccctccttcctctttacccatcctcgactcgcaagcatctgcccaacacatctcagtccatcatgagaatgccactctggtgtcgaggacctcgccctcccgactacaacaacaacataaccccttgcaaacactattactactatgctgcaacgattgcaggtatttcttgctgattttcccacgcccgtattcccagtctaattctggtttaattagtatctgaacatcctccaactaaagaatttcggaatcaagggcttagtaggatttctctcgtgtggtgggcttagttacccggttagaacaaccgtaatgtattgcatgtgtaattgggcccagtagtagttggttggttgtaagggctagctagttgcttttccgaaccggttgtcgccggtttattccctggtgtagtagctagtgccattttctgtcacctaatacactatccagtaagttgtgccgcccagatgtacgagtaaacttctttaaattccaagaattaatgttgcaaacatagcaaggacaaaaaggaaaaacaactgaaactattctggtaattttgcccacactttggaaagtcatcgcaatctacaaatctacataaccctggccgctgagactttctgctgtcaggccctggatgaaacaggtaaatgatgttacgaaggaagtttacactcgctgctcttctttacgcagccgtgtgcttcctgcggcgagggtagcaactgctgaattcagaccatcagcgatcaaaagcgtgagcattgcgtgtggtgcaata

SEQ ID NO: 4644 - protein, 379 aa, Spizellomyces punctatus
MVGKASLFAPLRLSPQITLAHRIVMAPLTRNRAIDANIPNELMAKYYEQRSNEGGLIITEGTAISKYGHGYANVPGIYTDEMEDGWKKIVKRVHAKKGIFFMQLWHVGRQSHPAFMPNNELPHSASAVQPNTNVYLPTGKMEKAPTPHAMTIDEIRRTLNDYKEAARRARRAGFDGVELHGANGYLIDQFLQDGTNKRTDAYGGSIENRARFAIEAIEAAIEGVGGEAGRVGIRFAPWGTFGDMSESNTEALFSYVLEKVNKFNLAYVHLVEPRINGNQDKSDASHARELQPFRDIYKGNFMVAGGYLKENANEAIQSGYADLVAFGRWYLANPDFVERLRKDLPLNKYHRPTFYTNGAEGYVDYPFFEEVKQVGVQSS

SEQ ID NO: 4645 - DNA, 987 bp, Spizellomyces punctatus
  source 1..987: mol_type = other DNA
acgccgacctgtttcacttcctcaaagaacggataatcaacatacccctcggccccattcgtgtaaaaggtaggacggtgatatttattcaacggcaaatcctttctcaagcgctcgacaaagtccgggttggccagataccaacgtccaaatgccaccaaatccgcgtatccagattgaattgcttcattagcgttctctttcaaatatccaccggcgaccatgaaatttcctttgtaaatgtcacgaaagggttggagttcacgggcgtgcgatgcatcagatttatcttggttaccattgatacggggttcgacaagatgaacataggcgaggttgaacttgttgactttttctaggacgtaggaaaagagagcttccgtgttactttcgctcatgtcaccaaatgttccccatggcgcgaatcggattccgacacgaccggcttcaccgcctacaccttcaatagcagcttcaatggcctcaatggcaaaccgtgcacggttttcaattgatccgccgtacgcatccgttcgtttattggtgccgtcctgaaggaactgatcaatgaggtacccattggcaccgtgcagctcgacaccatcaaacccagcccgacgtgcccgccgagcagcttctttgtagtcgttgagggtgcgccgtatctcatcaattgtcattgcatgtggtgttggcgctttttccattttgccggttgggaggtatacattagtgtttggctgtactgccgaggcggaatgaggtaattcgttgttgggcataaaggcgggatgggattgacggccaacgtgcctatttgtgttcaaaccaaatgagcatctgcaataagtatggtaccaaaaagaaatccagattttacaaagggtaacctaccacaattgcataaagaatatccccttctttgcatgtacccttttaacaatcttcttccacccatcctccatttcatccgtgtagatcccaggc

SEQ ID NO: 4646 - DNA, 6605 bp, Spizellomyces punctatus
  source 1..6605: mol_type = other DNA
  variation 5206..5305: note = n is a, c, g, or t
tgaaagacgggtataacccaaaatctccaacccaaaaccaaccacaataaactaccaattgcaggcctacgctagtacgtcccattcagaccaaaattgatcccacagaacagttacccgtcaggccgactccagtctgtcactaatcaatgattatgcccaaagaccccccccccccccccccgcttttttgacactatgtagtttaaataaaaaaaagactatgtgcatgaatgtgcgtcgaccgacatgccaggctgtcgcggtcgacagcggcaagaataaattaatttgtgtacacgaaggttcgcggtgccgtgatatcatcgtgcggatacttaatcatcccttcgaccgtgcaatcttcttcgggattgcacaggaggagcaaaaatattgagaggggacacatagtgtctatccggtgatgttccattcttggaggccttcgacgttaaaggagtcgcaaggtacgctgcggtgcggttcgacgcatttggtgtgaactcgcaatcagaatcgtaaagagaggaaggagctgggcttgaaaggtgctcaaaggacatgggcgacgaacaagagtattcattaaaggaagaagatcgagaatattcagaagacgacggagaccattcgttcccactgtctgtaaccatccaggaattgttaaaatactgttcctacagatgataccaagcgacacatactgaccgctagcagtctccaaacggaagtcattgttattctttttgccgtagtgcccccgcctcacactcttgggccgctctttgcgcggagcgtcaaggcaagagtccgcataacccattcgacagcatcgggtacaaggacgaagattgtcacactttttgcaagccttcttacagtggatgcacgcaatcttgcactgctcacgacgagtttcggctttctggcggatctttttttgagcaggcatatcgggatctacattctcttcgttctcaacatcgctcacggcagcctttcgcttgcgagctttaggttttggcgcttccgcgatgggttcggaaagcagtgagctgtgagacaagcgacgactggtgcgaacaggcgctggtgtgtaatccgcaccaaaggcgtaaatctcaaactcgttatcgtcctccggtgtagccagaccatggaaaggaggctgaaaatcaatgggcgacgaaatgtctgcctgggtgaagtctgaggaagggcatgacagatctgtatagcgcggctcgtcatcgaactcgtcttggagaatagagtcctgcgagccaaattcttcgtctgcaccgacgccaacgtctggaccaagactgtccaagaaatcaagcgacgtggagtgcaaaagtcgcgattccatctccggcaggaagctagcgggagctggccgcgatggggatgtgggaataccgcaggcctgcagcgccgttaccgtctgtttggcgtgatcttgaagatgcccttgagagtatcccaaatcaaaaatgaagggcatatctcccaggggaattggagttacggcagccaacggcgcctgcccgagtcgctcgggcgattgttctagcgtagagatatcagtcgtggccagaggtgcaacgacttcttgctcagcggcagacaaaacgtcttgcccaaacatgtcttgcatataagcaccaaggttgagcttggagacatctacgtaagggttgggcttgtatacgctcggattgtaggcatactgatgaaggcgcatgatctgtcaagagagcaaggaacgcataagtcaaaggtcggatttcatgcaccctggggtactaggcaaaaaatacgcaaagcgcgtcgcgtgtgggaatttattatcagaccctggggtagtaggccccatctggatctcgacatccggacattgtgaagcagcggacttgcactcttttagcaagcaaacgcacacattcacaaaagcacacaacaagagaaaaacaaaaacaacagatgcacacaaaagtacttaccaagtccatgtcgcacattccggccatgttaatttcgctggtcgattgagttccaacaagcatgattgaaacgttctactttcaaaccagcgcgactatgcgttcaaggtaaaagtgtaggagtaaaagtcaagttgcaaatgttgatgtgcacgttccagatggtgagagatgtcgctcaaagatgaatgttcccacgcagatggcaagagcacttttgaggtcgtaagcgtgttcttgagagctggtcttgtcttaacggaagcctttattgttcagttggttttgcccatgcggatggggtatctgacagttgaaagggacgagtgtcgggcgcgccacacaaaaagaacgcttttggcccgagtcggtcttgtctgtgtgtgtatcttgcagctagcttggagaaggctgtgtgtacgacagagcacacaagagcagatactgtccgggaggaagaaagaacgagtgagcaagaagtgggagagagcaaggagctggggggggaacgacgacgacaaggaagaagaaaaaaaacgggttttttttaatcgaggtgctaacccaatgatgaaacaaccaaaatcggccagcgacctttttgtatctctgggagggagagaaagaagaagaagctaaaggggagagagagggaaaagcgttgtctacaaagggccaagaaagttggagagagaataaggagacaatcttgcacgagggcgttccccagggccgattaccatcgccaaagaaggttttttggacaaaagaaactgtaaagtcaagggagttgtccgaaaggcaaaaagctgtggaaggcaacctgttcgccctggttagtaagtgtcgccaggaggcaaatacggttgttgcgttcattattctttttgttccgtgtgtgcgcgatggattcaaaaatggcatttccaacgccagacactcgaatggaatgtggagagagagagagaggagacaaatggcaggagagacaagacgaagagaaggagagagaggcaaattgtggaaaaaagacaactcttaaaggaggtctatcttacaggaattccttccttttacagttacatgacatgccatatatagttatatgatggccaataccatggttacttcatacggagagaactaagctcatcatattgcctttcgactaaccagggcctattgagcttctactaactttttgtgtttgtccctcccttgtgcatttttatatatgatatatatgcaatttcattgtcgtcgtcgtcgtcgtctttgctcgtttttggaggagtaacaaaaatataaaatgacagttgaagtggttccaacgattcctacctcgcaaaggcttttgcaaaccctgcaaacaacaaactacgcctgagtccgttttgatacccatatggatctttcctactaacaagactaacgcgtgcgtgttttttagggaaagggtttcactttgtgccaaaatgcatctactaacttactacgctttggcatggaactggaaccacaatcagaaaatggcaaaatgcccatcctgtctgtcatcatcatcttaccatttttatttttttttctgcgatggtgacagaccgcccccagggtccttgacctttatcttggccgtgtttcgtacaactggcacgatgcatcggatgagatcacagtccgcagcgttcggacaagcccacatgcagctgagaaacgctgattctccgtcaacacggcatgattcgttcttacgactaatgatgatgataacagttcttatggaaacaatgctgcggaaccatctcctgcgtcgcccgtgggaaaacgaacctaggttccatgtcgtttggtgcatccgtcctcgcacacggacgcctccgagttggtggaacaggagcaaaaggccagaagtttacccatcggatatccatctttctcgcaatcccacacttttcattttgaagccttgttcgtgggtccagataagacgacattgcccctcatggaagcgaacccgccctaaattctcgacttgcaaaggttgatcactttttctcacgttggtctcctcgtccctctcgttgttgaggttccgtgattatcaatacccctctcagcctgcataataatctcgtctcagaagacggcaaggaagagagtttttcgttcggtcgcgaattcattacccctgcagggggagctttttatatgattgcatgtaagctgatatagacttgtattccttggcccccaacgttattgtatccgcattggtccagtggttaggattccgcgctctcaccgcggcggccggggttcgattccccgatgcggaatcaggatgctctaccgcatatttttttgtcgcctttcccaatattcaatgtcccaagctagttattccaatgaaaagtcatagaaaatgtggcagattgtctattagcaagtcgctttcacctccatcaagccttctcagaccaatttccgcaagctctcaaagtctctttcaagaatggcctcaaataaaggcaaagggaagagatactgagttgtcgagaactcctatcctctggaatgcagctaacaggttgggcatagtgcggagccgatgatattggcactagtaccggaaaagcgaacgaactagttattcgaaggcaagtatacaggcaacgtaacggttgtttcgaccggaaaattgcccacggctacacgtcgtcccctactaggccttgatttcgaacccttggatgacattgaacccaagagtctttgcaagaaaggtagtctctgaaagccggataaatttcgtgaacaatagcttggagactaaaactactgggtgctgctggttccggttgcttgtcgttgggcggaacgtgtgccctcaatcccaggaaaattcatcattcttgaaggtagaagatgggggttagagtaaagatccctctctttatagaccttgagcgtgggaaaatgggtatccagatgaaagaaaaccaaaagaagcttccgacatgattacagacatttacatcatattcgtatccacaatcctcataatgaactcgtttggcacttcatccctcggagttctatctctcagtgacctccaggaattgttgcgttcattgcgcagcttcaaccgcacgacttcagcacgccagtaaccaaattaccgagagcaaccggtgaannnnnnnnnnnnnnnnnnnnnnnnnnnnnnnnnnnnnnnnnnnnnnnnnnnnnnnnnnnnnnnnnnnnnnnnnnnnnnnnnnnnnnnnnnnnnnnnnnnnctgccgatcaatcctcaatggtaggatgtacgtcccgcctacgccaaccaagcaccgctctcccaccctctgctactgggtaaggcaattctacggagggcccggtatgccccaataaaatattgtgtcctgggacgtactccttcagtttctgggttcacaaggactacttacagaaaccgtatctagaatgtacccgtgggcgtcttcaaaatcatagacggaaatgcaaagtggtggcaggaatcggtcgtgctgatgcttccagtgggaacctcaggtgcttgcggccacttgaacgtttctgccaacgacgtaatacctttctgggccgtaggtgcctggcagaaaacgggctataacgatatagtcatccagtttagcatgaccccacacatgaacgactcgcttcctgcctgtacgagacccgcttcaccgcctacgcctactgtgtcccgcacagactgcactacaatcctcgatgggttgatgtacgtcccacctacaccaacgaacaccgctctcccaccctctgttactgggttaggcaattcatacggagtgcccagtaaaccattgtgcgctgggatatactctttcagtttctctgtttacggcggaccggattcacgctttacagtgggcgtcttcagtagcacggaccgatccagaaggtggtttgaggactcggtcgtgctgatgcttcctgtgggaatttcaggtgcttgcggccacttgaacgttccagagcacaactcagcaaattcttgggccgtaggcgcctggcaggaaacaggcgataaagatcttaacatccagtatagtatggctctacaaacgaacgactcgcttcctgcctgcacgacaccacctacgcctactgtgtccagcacatactgcacttcagtcctcgaggagcagatgtacatcccaccaatgccaacgagcaccgctttgccacccacgaccatggagttcggcaatgctttcatatggcctggtaatcctttgtgcgctgggacgtactccttcagtttctttgttttctggtatcaacagggaccggattcacgcgttacagtgggcgtcttcagtagcgtagacgataccacgaagtggtggcaggactcggtcatgctgatgcttcctgtgggaaactcaggcgaatgcggccacttgaactttccagagcaaagatcagcattctcttgggccgtaggtgcctggcaggaaacgggctattcaaatataggcatacagtatagattggctctacagacgaacgactcgcttcctgcct

SEQ ID NO: 4647 - DNA, 2067 bp, Spizellomyces punctatus
  source 1..2067: mol_type = other DNA
acattagcatacccatgtccatacttgctaatagcagtgccttctgtaatgatcaatccaccctcattcgaccgctgctcatagtatttggccatgagttcgttgggaatattggcatcgatggctcggtttcgggtcaaaggtgccatgacgatgcggtgagcaagtgtgatttgaggagataaccggagtggtgcgaatagagatgcttttccgaccatttttttgttgttgttatgctgtgatgattattgacaagtgatgaaagagactgcttttttgtggttgttggattggagaggaaggacaaagctgtcgttctcccatttttatagtgtcgctgatgattattcctcatggtttgaagattacaaatccacaagtttttattagtgtggaggtgattgaaaatggcactaggacccattattatccggattaatccagttaatcatatcgcataatcagcacccccatctatcgctcaaagcggtgaggcatgcatgctaatgttctccaaactgcggtgtggcatgctaatgtaactttttctttttcaaattgcggtgaggcgcatgctgaaggtctataaaaagggggccttttgctgtctctccccttcctcaccagttcctcgactctcaaaccatctgcgcaactcttctcatcgcgactctcaagtccaaccatgagaatgcagatgtggtggtgccgaggacctcgccctcccgacaacaacaacaacaacatgaccccttgcaaacgctgctactactatattgctacgatcgcaggtatttcttgctgattttcccacgtgtattcccagtccaattctgatctaccttagtatctgaacatcctccgactaaagaatttcggaatcaagggcttagtaggatttctctcgtggtggtgggcttagttacccggttagaaacaaccgtagtatgttgcataataacatgcgcgttacttgtcgtttaagagtttttgtaattcaacattttcaaattcaagcacaaggtcatctatccagactgaagacggagacgcacattcacatctcaacatcaacatggtattcaaaatacaaaaagatgaaagtatgtcgttgctgatgaaccatgaaaatagggtggaccacgacagggatgggacattggatcaaaaccgtgatttgagcaaaaactaacaaggcagagtttctaacaatgtcgatgctggcatatcctatcagatattgatcctaatactatcgggctgtgttcgcccctttcccaatatacagcctccacctcctcctcctcctaagcccctccaacattttacaagccaccacccattaaagacaccgtgcacccgtacgcacaaaaacattaaatatgggcgggtggccaaaaaaaactaaagaaaatctgccactttaatattctacaacgtgctacctgatgcaaaatccatcataatacaaattcatgccacagcaaagcgtgtatgacgatctgttgaatagtatttccagaacgtattttttgctcatctgaggactgaacattgtcccagccacctgcaatgggatttgtctggacccatattgaatgtttgtaaacgcatgtcctcctggcaattaatcgtaaattgctttgactgaaaatgttttaattttcaagtacagggtcggacctccttggatggggtttccccccctttgtgcgttcgtttgcaacttgtctcctgtgcggtggcctcccgccaactctcctcgctcttttgttacccggtgattggtaagaggtaattaaaaggatacatacacgtgccagcaggtggtatcacagaataaatcgggggaatcttgtggtcggaatcccggcacgtgcatgattccactgatgacataaccttaaactaaaatcgcgcgtcggagtttcaaaagttggcgagtctccgtatgcgcagacacacgacgcgcacttgatccgccgaattttcaacagatagaaatatcaaaaaaatattcaacatacaaatagtaaaaaaaaaagaacaaaattaaaacagcaa

SEQ ID NO: 4648 - DNA, 762 bp, Spizellomyces punctatus
  source 1..762: mol_type = other DNA
aatttcctgcttccttttctcaaccgctgccaatcttccctgccaattggccatctggaaaacaaaacttaatgaaacccacagacagaggacctaatacaacatagttcatatttcaagcttacagcattgttaacggaccctgtcctcttaaattcgtcatagaattcccatcgcatctcctcaaatgagaaatcggcttcacgtatcaggtgtatctcaccgagcccgtaggaggttaatggccagataccgctagcagactccaagagatcgaacttcaccgtttcccctgatggtggtgctgccctaccattccggcaggtttgagcaatttgaatactgaatagtattatttacaagtcacctctccaccttgtattcgcttctgacttggatcgttgcccgttgctgaaatcttggcgcccaaagccgccttggttccctccctcaaatctgtttcgaggaccaccgccagaagaaaagcctccgccgcctccgtatccgctccctcctgcaagatcggaagaacagtgggtacgactgagaacacatcgtttctaacagggaagatcatattggtacctacccgaccctgttggatgctcatttctgcagcttcgaccgaagcggcaatttccttgcaggaaaaatttgcacaccggcatgttgaatcgtcaagaagcccttcatgttgttggagacgttcgtcagagactggattcacaacatgcatatcacgtgcaatctgatcgagtttat

SEQ ID NO: 4649 - DNA, 1051 bp, Spizellomyces punctatus
  source 1..1051: mol_type = other DNA
gacaacttcttcattccacgtttgtatcagtgatcgacattatcagcactcaagggtcaccgataattggcccgatgaaggatggtcttgtttccatgcactcatactgtagtacaatcgaggatgctgtcagtggacgatggataatctctgtttgatattattcgtcccgtcgctcgagaacagacttatgaggagagtgtacgtaaagaatgtgtccgctattaaacgtatattgaatgaggtacgtaagaacatatccttggtgagtgtggacatctgtgtgtgcttgttctgcaaaggataaggcgggaaggatatcaatgcgccggcgaggtggtgcgcagacgcccttgtcggttcagagaacgatggagttttcaacagcagttccgtatattcgactcacatccattgtttgacatgtatccgttgagattgcatgcacaagactaagtggatcgagaaggaagatcgcgacgtattgatggatctgaatgtgaaacgtgaagaatatatgggtgatgtttcggacatcacgctcgaccctctgtgctgaagtctataaaaattgctttcaggacattcgtacaatcccacacggtacgttcacatgcaagtgaataagctagtccttgattgtctctcgcacaatagaagccgtatctacttaggttcgattatagatcaaagcacaactagtctatgcaagcttcacttctcaaataatcctcgacgtctatcactacacgtttctttcgcgcttcttcagcagcaaatacaagcacatgggacatcagggcttgttgagggctgcatccgagtaatgaagcgtttccttgcgccacagcctcaatgaacgttgccataagaccataatcccctccaccatgcccagaaccgccaccattaattccttgcgtttctgtccctggatctattaccgtcgttttaccggttgcaaaatctgtgtagcgaatggtttgtgaatccccaataatcgcgccacgtgatccatgaattctagtttgtctttcacagactagttcgc

SEQ ID NO: 4650 - DNA, 1421 bp, Spizellomyces punctatus
  source 1..1421: mol_type = other DNA
ttgaatgcccgccttggccaaggaagctcttcagaggtacataatccagttgttttgctgataactgttccctgccaaaaacgagcacgcttttcgaacatcctgaaagcataatagattggagtaggaggagagctacgacgcgaaccagtttaagtctcgcagggtgggatggctcacgccttcttcgcggtgggctcgtcccgtagaccccgtgggtaaaaaggcatggctctttcttgaagatggtctcagggaaccacctcttcgacagaatggaggacaccttgtgggacttttcccaattagtctcatgggcgagttcctctgcatatctggttcaatttgtgaaagctgactgaagaatcccaaaagtgatgagtaataatgataccaatataaaatggctacccacaaggtctccgactgcatgctactacttcttgcaaaggcagttaaaacatagtatggaggcgattgaaaatggcactatgacccattattatccggattaatccggttaatcatatcgcataatcagcaccccttctatcgctcaaaacggtgtggcatgcatgtaatgttttttttaaaactgcggtgaggcgcatgccaaaggtctataaaaagggggcctttgctgtctcttccctctttcctctttaccccgtattttcccgagtctaattcccattaccttagtatctgaaacatcctccgactaagaatttcggaatcaagggcttagtaggatttctctcgtgtggtgggcttagttacccggttagaacaaccgtaatgtattgcatgtgtaattgggcctagtagtagttggttactagtaagggggagtaacttggcttttccgaaccagttatcgctggtttattccctggtgtagcagctagtgccagtttctgtcacctctacactagatgaatatatactcttcgtagaatctgaaaactcaattaaggtctggagttaaaggcacctggactcatcgcctgcacaattgcacatccacgacattctcctcgccgcacgaccactatcgccaccgcaattatcaaacacaatcatgcttcgagaagatatcgagctcagaacgaaagcatcacgaaaaatgatttgcgatgcttgaacagcaaataatcatacacatctgatcctccgacatcacctcagggaccctagaatagcactaatcgcgcaatcagagcagaaagcgggttacaatatggaaatcatcacagaaaaccaattgcggcaattctctgagtccccaatgcaatgttagcagtgtaaagcagaattgtcgatcgacaaacgctcaattaattcccaattatcagtctaatctaggctactaattggatattttgacaacagttttcatcgcggatcgccgtgcgaaggca

SEQ ID NO: 4651 - protein, 282 aa, Spizellomyces punctatus
MTKKVDEPSIDQKFALITGYGPFKSFKVNPSYESVRNLQARVFPGLGLDNNEGHQQNEVLVHVMEIPVEYHRVHAIAPTFFNAASSPRFVLHVGASGQLKPAHMVFETRARNGPYMSKDVVGDLPEGNQCFPPEGLGNVGEHTVEEELRVCPKLLAQVVERVQQELDSLGDTPNTPSKSSSEVPTESEEIAKKNDTGDVPDVEQTFEVSKGLWKVGTSTNAGLYLCEYIFYHGMHWAKRRWEVAPPVFFLHVPSVDVEKGHRPQEELNRAIELVVKALCAVC

SEQ ID NO: 4652 - DNA, 1065 bp, Spizellomyces punctatus
  source 1..1065: mol_type = other DNA
aagggattctggcattcgaaataatgtgggcacccatgatagaaagcctttaggaagacgcggaggtcgcccgctgagaagagtttcaaaaaaaaaaataaaaaaaatgcgattaactgattcagttcccatagcgccgtcatcacaagtacatctcccgtagtttgccctccggctgcgttcacatctcaccttgccagagctcgcctgggggagtaaatgtctcgaaaaaaagtccgtacgcagcaaaatacgaagaagcatagcaaaccgaccgagaagaaagtggaaagaggcacgataatgccaggtttcactttgcgtggaatctcatcatcgtcatttttgccagcggcgacaacaaagtttgcaaccgcagttcgtaacgctgtttggtacgaggtctcctctaagaggacatgcgcgcggtcagtccccatggtggggatggctggcaacgtcagtgcaacacctccgaggggcccgtgaatgatgcaaaaatgctgtctataatttgggcgcaaagtacgttttagggtttccgttaacgggatggatagcatccagttgcaatgggagatcgctacaaaagcaacgacgagcactgacggtcgatcacgtgcatctcgtaagcgaaatcccgtacacatcagcagcctgtttcgggacaacggcaagccgacaccatgacgaagaaagttgacgagccttcaattgaccaaaagttcgcccttattacaggatatggggtatggcggcctgtctctctgtttctggaggagtgttatagaaaaccaacatcctgttggccaaatagccctttaaatcttttaaggtgaatccctcgtatgaatctgtccgtaatttgcaagctagggtgttcccaggcctaggccttgataacaacgaaggacatcaacaaaatgaggttctcgttcatgtcatggaaatccccgtcgagtaccatcgtgtgcatggtaagattaccactgcactacgttgttgtgcaattagagactaaaactggagatacaagccatagcgccaacattcttcaatgctgca

SEQ ID NO: 4653 - DNA, 556 bp, Spizellomyces punctatus
  source 1..556: mol_type = other DNA
ttggctatacatcagcgcatgcgcttcttgctctctctggaatactctcctccttcctctctctgatcaagactctgagacagtataaccgcttcaccggctttgcagcgctgacgaatctatcggaattccaaattttgaatatttgtctccatgtaggcgtaattttgctggggataggtaaggtgacttttagtagcttgtaactgtcctagttcccatgagcctgacggtagcgttgagttagcgtatctcactggatttgccctccacgtgatggcatcgactcctggatggtacatcgtttctgcattgtgcgagatcttagtctacggcatccaatttgttctggtcgtcctgaactatcggtaatagcttggtatacaagtcattggttcaaattttattctcacagcgctcgtaggtcatggatgcacgccttcaaattccaatgtacatcatgggcgggacttgctttcgtcttctacgtagtactatctgttctatacctcgcattgttctgcgcatatgcggcacaactcaaaacggaagcagt

SEQ ID NO: 4654 - DNA, 1612 bp, Spizellomyces punctatus
  source 1..1612: mol_type = other DNA
agttccccacgttttgttctccatgttggagctagtgggcaattgaagcccgcccacatggtattcgagactcgtgccaggaacgggccatacatgtcaaaagacgtcgtcggagaccttcccgaaggaaatcaatgctttccgcctgaaggattggggaatgtgggagagcatacggttgaagaagagctacgggtttgtccaaagttactggcccaagtcgttgaacgagtacaacaggagctggatagtctaggcgacactccaaacacgccttccaagtcatcatctgaagtaccgacggaaagtgaagagatagcgaaaaagaatgatactggagatgttcctgacgttgaacagacctttgaagtttcaaaaggactgtggaaggttgggaccagtacgaatgccggcctctatctctgtgagtacattttctaccatgggatgcattgggccaaacgccgttgggaagtagcccctcctgtattttttctccatgtcccatcggtagatgtagagaaaggacatagaccgcaagaggaactgaatcgtgctatagaattagtggtgaaagccttgtgtgcagtttgctgatgtatctaagtagaaaacaattttcaatgtcctgctatgtacctcatcatgtagatgctttctagtgtagaggtgataaaaaatggcactaagacccattattatccggatagtccggttaatcatatcgcataatcagaaccccccatcgctgaaagcagcctgctaatattctccaaactgcagtgtggcaggctaatgtaactttttttttaaactgcggtgaggcgcatgccaaaggtctataaaagggggaccttctgtctctttcccctttcctctttacccatcctcgactcgcaagcatctgaacatcctccgacagtaggatttctctcgtggtggtgggcttagttacccggttagaaaaaccgtaatgtattgcatgtgtaattgggcctagtggtagttggttggttgtaaggagggaattacttggcttttccgaaccagttatcgctggtttattccctggtgtagtagctagtgccattttctgtcacctctacactaccaacagtacacacaatagtgaactctcggacactgcaagctgtgccacctacgtgttgttcggcttgacgtaagcatggagtgacctgctctctagacatggggattaagggccaagctgcagatcgaacagacgccttcgtatgcggatgtcaggtcatgatagaacggcataatccgatcgataccctgctcatggtaaaggtctccgtgtgctcacggtaacgtacaacagggcccttggcttaaagaaagcctccgcttcaaaggcacttgcaaccctctacctacagatgctctttcagccagctcaatgaccgcaatgtcgaccaccttgtgtaattatgcgtccggaatcttacaggattcagactttgctggatcgtgtgcatggcgggaccttgcgacagatgatccatggattaattacatttccgaggtacgtacatcgcaagcgctgtagtgacaagcttctagactgtacattttatatccatgcaga

SEQ ID NO: 4655 - protein, 189 aa, Spizellomyces punctatus
MNNFAQREFNSIVIGGSVLALNAGFINVVTLAGVFTVTVSHHTGNVSRIAMALLNADITTLALVTSILFSYMFGSFIAGFMVGDNKFRLGRGYGYALILESACLFASFVFLRRELIVGEWCAAFACGLQNALATSYSGAVVRTTHMTGICTDIGNILGQACRLDTKAELWRLKVHVPLLISYLIGGILG

SEQ ID NO: 4656 - protein, 189 aa, Spizellomyces punctatus; identical to SEQ ID NO: 4655

SEQ ID NO: 4657 - protein, 189 aa, Spizellomyces punctatus; identical to SEQ ID NO: 4655

SEQ ID NO: 4658 - protein, 189 aa, Spizellomyces punctatus; identical to SEQ ID NO: 4655

SEQ ID NO: 4659 - protein, 165 aa, Spizellomyces punctatus
MGRAIFRRTISDSYTGGCSSSADPPAGPAAPSTNDPPTNDTTTNTAPSCWAFCTGVITYIKTIPLRFKINYWGLNQAVYDELRGHYVAYRLQRECFRSAYLRSRELVFERLRPLTRAEEEGLRQLAEERDPEMGVDYWGIREYEEQIRQGLIERAPEELVPSDDE

SEQ ID NO: 4660 - DNA, 3052 bp, Spizellomyces punctatus
  source 1..3052: mol_type = other DNA
tgtcccaatattccgccgatgagataagaaatcaaaagtggaacgtgtactttgagccgccaaagctcggctttggtgtcgagccggcatgcttggcccaagatgtttccaatatcggtgcatattccagtcatatgcgttgttcgcacaacagcacctgagtaacttgtcgctagagcattctgcagcccgcatgcaaacgccgcacaccattcacccacaatcaactcccgtctcaagaatacgaaactcgcaaaaaggcatgcgctttcgagaattagggcatatccgtatccgcgcccgagtcggaatttgttgtcgcccaccataaacccagcaatgaaggatccaaacatgtaggagaacaaaatgctggtaaccagcgcgagggtggtaatatcggcgttgaggagcgccattgcaatccgcgagacgttaccagtgtggtgggacactgtcacagtaaacacaccggcgagtgtgacaacattgatgaaaccggcattcaaggcaagcaccgagccaccgatgacaatggagttgaactcccgttgtgcaaagttgttcattttatggaaggtttaggcggttttctgcagtctattgcacacaggatgactgggaataatggtatgagggctaatgagcgataattcctagtagacgtgccctaaaaatgttcagaataacgcaaccaggcgctcagtcgagaattggttattatgaaatttaccgtacaatagactccctaagaacgcaacgtgggtgagtcgcactccccgctaaaggtctccgcaacgctccgattgctatcaaatcctgctgtcagtccaacacgtcaatcgctgatgaacccacagtagaaccatccagctattttccagtccaactcgttaaaccctatgctctcaccttgaggatttgcaaaaatctccagcccaaagttcttgacgccgattacagcagtgggaacccagtctcatcagcgcggttggttgatcatgtaagcagatcgtgtaagcatcaatcatgattgcagctatctgtacattagtgtagaggtgacagaaactggccctagctactacatcagggaatgaaccagcgtaaactggctccgaaaagctaactaactactactaggcaattatacacgcaatacgtaacggctattctaaaccggataattgcccaccaccacacgcgttcctactgggccttgatccggaactcttgatcgacattgaagccagagtcatcgcacgagagttaatatcgtcagggagactcaaaagccggaggattttcagtaacgactcattcatcatcactgggcactagttcttcaggtgctctctcgatcaggccttgacggatctgttcttcatattctcggataccccaataatccacgcccatttcgggatcccgttcttcggctaactgccttaaaccctcctcctcggcacgggtaagaggacggagcctttcgaacacaagctcgcgcgagcgaaggtatgcagatcggaagcattccctttgtagccgataagccacgtagtgccccctcagttcatcatagactgcctggttcaagccccaataattgattttgaatcttaaagggatggtcttgatataggtgatgacacctgtgcagaaagcccagcaactgggagcagtatttgtagtggtgtcgttcgtgggcggatcgttggtagacggagcagcaggaccagctggcggatcagcactcgacgaacagccgcccgtataactatcgctaatagttcggcgaaaaatagccctacccatgataaagaaacgaagaagctcatattcccacgtctgtgacgattaacacccagttcatgcgccactaatgcgccacatactgcaagccacatgcaggaggtgcgcgtataaaaggcgtcctttctcacgcgctcctcttcccactatcttttctgtcgagtagttgtgttgcagtacacagttactgtatacaccctgctcgcaaaacagaaaaccagtaaattggcagagttccatgccggccataggccacctcctttttctcctcatcgcaatgggggcctgcatgtttgtcagctccttgtgtggctgttccaagtgacgggccagtattgtggtggagaggataagatcggggcgggagaaacaactctcgggtggtggacgagcttcaccgctgcactctaccgtgggggcctgcatgtttgtcagctccttgtgtggctgttccaagtgacgggccagtacggtggcgggttgctcgatgttttgctccgcctacattttatatatacattttcacattgcctagcagtacacagcggcttgcattattgatgagcccattcatatgaattgccaccaacgacaagatttgaacttgtggttactgcttgcaccagcttcacctatagagatctatgaactggtgattccatcacagacgtcatggtttggctatcatattgttgttggtgactcccatcgtggcagacctgatgattaggtatatgtctcatatacttgccgatctagtttcccagttggtctctgatgactacctactgctgctgtatgtcaaaacctctttcctcaactcctttcctatcattcgcgctatactgtttaatgacatattgtggatcttgtcttttgcggtttgaggtctatttctattgtcctcaactgtcaccatatgcgaatagtacaatatatttacgatattggtgacctttttcatatgaggctaatcgcctgtctgttttcactgaacataattgagaatgttcgcctatttcccaataaggaaaaccctgataaaatcatctcccgttcaaacttttcaatctccgactccaggacggttcccgtataatcccttggcgtctattaatagtcgatacccatctcctgttagttctgatcttttgatgagatatgttcagtttcatccatagactgtctttgctctacaagactttgaattccttctgcatctgggtaatactttgctttt

SEQ ID NO: 4661 - DNA, 1130 bp, Spizellomyces punctatus
  source 1..1130: mol_type = other DNA
ggcctcgaggcttttgccccactcctattgcatgtggtaacagatgcagatgtggaaatgccggacatcgacaacgaagaggacgatgaagccgattgcgccgacgctgctgatgactcccgcccagcaaccctctcaagtgcggcacgatcatcaactcctctacaagccgcatacgtgtcccaggcacctcaaagacggccaacacttgaatctacctacaaacatcgcaactcaatgacactccagtcacggccgccgtccgctctggcctttgggtcgccggcagaacagcgtcgccgatcgatcatatccgcctctcgacataccttgcgggagtcaccgtcgcattctcgacgctcctcaatctcacaacaacagatcatggcactagcaacggaacggatgtcagccggaagaaggggacctgcgtcagtccgacgagagcccgttgctggcgaagccgataaaacgtcggacaaaacaggcgagaaacagaacggtgatataaaaacatttgcgcggaccgacaccaacacacccaatcctgaagctgtatcaatttcaaggccgttgtcctcatcccagcagaaatctgctcggccggcatccagcagacgtgtttcgattgcggctcctcctaccagcttatcacgaagaggtacattaacagggaaaatttccaatttttctgctcttgtgaaggcagcccttgatgcacgcgagaaggatagcctcgcagaaaagacggccaaagctgagatggaaatgctacgagaaaccccgaatatcgacgatgatgcagaagatgttatcgaggaggaaccgacggcgatcgtcgaaccttgcccaatacaacctgaggcgaatattcccgacaccctgactccagacccgggcgaagcggctgagaggcagaacatggttgagcttgaaaacgcacgccccggctcttctgagccaattgacaggtctcgatccatatcacgcccatctacatcctctatcttgaaatcccgtccgccgtcgtccactttgagcacacaccgcagctgcgcatcatacacatcagcgactagtccatatccatgtgaaactccccagacgccttctgaacctgaaatccctgc

SEQ ID NO: 4662 - DNA, 482 bp, Spizellomyces punctatus
  source 1..482: mol_type = other DNA
cctgaacacttgtcagccgttggcatttctgaaatcagctggggttcagataactcacctctaatatccttaaacaatcgatctgatcctcttcgttatggctgaacttcaaaagcaatttgccccagcgcttcaaaacctttcgcagaatgacggtcatttttcaaaaacggagtgtcagcacaatcgagagagctaaatacctggtccagactttgcggtattttgctcaaatcgatcaacttgagaatggatggtatggaaatctttcggagatcatggaatgagatattcattgccatcttcagggtgttcaactccagagcagcaatatcgatggaatggccttcattgaaggctcgctccaaggtcgcttcggcttcccgtttccaatctgttcatgcataaggaatttgagcgttccacaacactgtcatgtcgtagacaactcagaagcacaccattttcgtcctcagtttcgc

SEQ ID NO: 4663 - DNA, 1372 bp, Spizellomyces punctatus
  source 1..1372: mol_type = other DNA
acgtctgcctaccaaaatccgcaccaaacggacgtgggagcccatatctctcactgccgccgctgaaaccaagaagacagtgatccccactatgctcctccgactaccatcaacactgaaggcagcgcattgcgacgaaaagcgcttgctaatgcaagtgcacctatgggctccacttggtaactgtgctccaagtgtggaagagggcaccccaccgcaggccttaccgaacgtccttcgattttggagcccgcaatgatcaattgtaatgtagaggcgatgatagggcacaggcagacagaaataaaccaatcgaactgcataccacttgagccaaccaatgaatcgacagtaggtgaaacctgctactattatatgtctttgtgcaaaatgggtttcccatctcttccatgatatttttgtgatagtgtagaggtgattgaaaatggcactagaactcattattatctggattattctggttaatcatatcgcataatcagcaccccctcgatcgctcagatcggtgtggcatgcatgtcatgtttttgcgtgtgtaattgggcctagtggtagttggttggttgtaaggagggaattacttggcttttccgaaccagttatcgctggtttattccctggtgtagtagctagtgccattttctgtcacctctacactaatttgagcttgatgcaacgccagccatccttgagggcttcccgtttgtgtcaaaaaaaggttacgaattaagtctacctgtcaatcgaggaccctcggatgatctcgatctgtagaaagcagtgctgcggataggtgaaaatagcgttcatcaccggtcgcgacttcgtcttcttcatactgtatggggtggccccatgtccatggcttttcgcttccccacctgtcaccttatgaaggtggtttgtagccccttccttgcatggatatatgtatatacgacttcattcccttgccatacagcaaaattcgtattcgtatgcattcagtgttgtgtgattgatatggtcagattacaatacattatgtttctgtgcactacattgagaataataattaatcagtcttcgtcctcgtcatcttcatcgtcgtcttcctcttctgcctcctgcagccattgtacaagtgcctgtgcctaaagtcacaattgcagtcatgatccatccacaatagatgcaccatattgcagtacgttacataccgcttctcgaatttttgactttggttcgggggcagacttcaagctttgatgccacttgattatcgcgtcttcgcttaaaacatccaaatcgtacagcccatgcagaattcgtgacacgaatttgacataattctcgtggataacgcaaaagt

SEQ ID NO: 4664 - DNA, 581 bp, Spizellomyces punctatus
  source 1..581: mol_type = other DNA
tgaatggccatggtacgtaaaactgcaaagtgcgcgttaacgagaacctacgtagcactgcttccccgctttttcaaaaactcgagggctttccctgcactgactccactcgtcggagatgcactgagaatgttcatattggaagacgacgagctcccctcatcatcagcactaaagcctcgttcccattcgccagatacccacaagctaccctttggttgacgtttcccgagtttgggacttttgggtcctcgcttgtcctcttcaactcggtttgcgtcctgtaataagggttccttgtgtcttaccactggcgccgatgcttctcgtcgtcgtatggatggtaagcgggggagagtaggacctgcggcacttgactggcgggtgattttgccatccacaccagactctttgtgagtacgcaaaggaagtgtcggcggaagggtgaaagcgaccattgaagtggaccgcttgcatttgggcgatttaggaatgtggtgattggatttcatgaccacatgaggtttttgcatccacctgccaacgttgtagaggtatgtacaaaagacaatgagagcttc

SEQ ID NO: 4665 - protein, 291 aa, Spizellomyces punctatus
MHASPVGPTENTDSAGATATSASLSPPSNPPPPSPIILYELIIRQQPNRARMCGFGTKDYRPVDPAPILQLIRREGDRVVLDYKESTSLVCHASLWSADGTEERGVVLNPGSAAARRTESLFAGESTLTPPPSSYVSVLVGSLVSPCHILTDVDGQKALFFTFADLSIRTGGHYRLKFFLYDITKDASQAMASAMSDIIAVFPPKTFPGMTESSQLAKCLARQGIKLHIRTDMRRNSGSTPGETGSNNPYLMSSLETSYIDGELPDDGPVDFGELAQSSNDLEDPSNMGSL

SEQ ID NO: 4666 - DNA, 462 bp, Spizellomyces punctatus
  source 1..462: mol_type = other DNA
tccttggtgatgtcgtacaaaaagaatttcaaccgataatggccgcccgttcttatgctcaagtcggcaaactaatggagcgataacagaatattcgaaccttggtctcggaaaggtggcgtgctattcttataaaagaacttaccgtgaagaaaagcgccttttgtccgtcaacatctgtgagaatgtggcaagggctcaccagggagcctacaagaacggaaacgtagctagaaggtggtggcgtcaaggttgactctcctgcgaagagcgattcagttcgtcgtgcggcagcactgcccggattcaagacgactcctcgctcttctgttccatctgccgaccaaagcgacgcatgacaaacgagcgacgtactttccttgtagctatggacaaaacagagacaaattcaccgtcagatcatctgcacggaggtatggaaaaacacatttttggtattat

SEQ ID NO: 4667 - DNA, 1444 bp, Spizellomyces punctatus
  source 1..1444: mol_type = other DNA
tcagaccaaaaaaaaagagattattcttgggaagataacaaaaagcctcaatggtgagggatgatcctgctagtgctgtcccaatgtaccgcacagtgtccacagacaagtttattcaaaaaataatgctggcatttatacggatcaatatgcttgatccttgatttgaaatttcaaaaatactggccgccatggcggggcagtaagatataaatagctttgctcacaagtaaaaacaaagggttaggttgggttgcggtcacatgacactaagttcattgagatacagtacattaaagagtccgaaagcatagtgtggaggtgattgaaaatggcactagaaccccgcataatcagcaccccctctattgctcaaaacggtgtggcatgtattgtaatgtttttttttttttaaactgcggtgaggcgcatgccaaaggtctatgaaaggggggccttttcctagtagtagttagttagcttttccgaaccggttgtcgccggtttattccctggtgtagtagctagtgccagtttctgtcacctctacactattaggattcaatcgtatcaatattaggacctcatgcacctcaacccatcaccatcaattatggtactctactgatgcccgcaagtcacagaaacgaaaagaaccagatataatttaaaactttagaaacatgcaaataaaaagaacattgcacaaatgcaacgagaaggcgtgtttctcgcagctacgtgcttatccgtcagtaagtaaaggattacatcagcaagtctcgctggtctccttgctgtttccctccctccttctcggtctccccccctctctctctctcggccataacgcgcccaagtccccgcttccagaacaggggctgactctctacccgatcacagcgggatactatatccgccaagaaaagaaaaaaaaccaatacaaccttccctaaatacaaagccatcaatcgctacatgcaagaaaaaggccactgggtcatgaggttgaaaatgccgtcattcgaatctgattccattcctttgtttttctttcgttcacaagcttcccatgttcgatgggtcttccaaatcattcgaactttgagccaattcaccaaagtctacaggcccgtcgtccggtaattcgccatctatatacgaagtctcgaggctactcatcaaatatggattgtttgatcctgtttctcctggagttgatccagagtttcgtctcatgtcggttcggatgtgtagtttgatgccttgccgagccagacacttggcaagttgggaggactctacaacaaagaacatgtcaagaacgctggacgcgtgaaaacgaccgccaatctatccaactttaccagtcattccaggaaatgtctttggggggaatactgcaatgatgtcggacattgccgatgccatggcttgtgaagca

SEQ ID NO: 4668 - DNA, 1168 bp, Spizellomyces punctatus
  source 1..1168: mol_type = other DNA
ccagtgttagctttggactcttggtagagtagacatcatccgcagcccggtacaacatggcctctggatcgtactcgtcatcatcctcctttgatttgtaggtacgagtatcggtggtagaagcataggcagacacggcctggtattcccgttcatgctttgacacctcgtcgtcttcaaattcgggttgtgacaagaatccaggagcgtgttcctcgctaggggtagatggagcgggatcgtatcgatcgtagacagcagccattattatagaatattaaaaagactagtagtaagtatctatgagtctatttgtatgagattaagaaaggtatcagcgtgcgtccattcgtagtggtttttgatgggggatagagagggaatcggtaaagaagagtggaaggagaccagctcacttcgatacaggcaagaattcaacaaaagggttgaatctgtagcgagttcccttttgaatgaatgcaagagagcctgcgacaatgaaccagcaagcaacaaatcaaagaacaaggaaggaggagggaagaattcagatcccctctaaaaagcccgtctgttctgttgttattttacaaacacactcttacaacaacatcttctctttctattctaaaaactctctctctctctctctctttcgtcagccaactcttctcaaaacggttcaacaactccctcccaaaacagtctaaatgaaggtcacttaagagaaaaagtcaaatggggggagagaagaaaaatgagcaaattagatgtgaaatttaaagagttttctcttcttgttctcagcagatgccgtcgtcacggggggagtttagaaaacgatttgggagttttcaaacaacactccacacaaaaatctctctctctttgcctgtcgtgacctttctcccaactgcaacagttctgtctcactgactgactgttcacacttatacatgactgtgccactgtgcaattgaacaattatgtgagacgtttaaagatgacgcttttggttgatgatttttctatttttgattttggcttttgtttaaacgttttgtctcatcatcccatctgccctttccaacgaaattcatagtgctgtttttgcttggcttttctttcttggggtttaccgttttcaaatgatgtcaaaggtgcattc

SEQ ID NO: 4669 - DNA, 2934 bp, Spizellomyces punctatus
  source 1..2934: mol_type = other DNA
cgaattaaacaaagtcatcagttattgtcaggatctttggtttcctaatttccggaatgacaaaacacgcggattgagcggtcaagattcgcaagcacccaaacaaccccaagaatacgacaccctttcgtgggctgatgtcgccagaacaaagtctgcatcgcaattaaagggaaagaaggaaacggattggagtgaggattcgcgatactgggaggatgaagacattttcgcccacagccgagcagttttggctgcagactggtaaactttaacttttaaattcctattatgcattctccatattatctctcttatgccgtagaacgtacgatgcttaaagaaaggcagtatagaataggtgttatcataaagcagccaaatacaattgcaaagtcattccagtaaatttcaactttgtacatacattcaaaaacgatatacaatactcaatattcccattccacacaatacctttttcaaaaacatttccttacgcctttttcaaaaaaatgtacgtaacaacaacaaaactactcttcatcaaccccctcaccaacccgcccaacaacacccacaacaccctccaaaaccccacgagcaccctccctccactgttgaacctccccaaactcacatgcatcaacagaccatataccatccgcagcataagatacccaacccagggaattgatagtgtcgataaaggatgcgatgcgggtttcgccggaccggattttagcgatttggggcggtttgtacatttttgagagaaaggtttgtgggaggggtgtgtggtgttttaggggggttgtgaggcgtctgtggagggtgcgagggcgccgggggaggagacgggtagggggccgtggtgaagggagagagtcgtctgggacggggtgttggaggagggggtccgtgatgttgggtggggcgatggaggtagagtacatgtagcactatgagttatcgaatgaataagcaaaaaaaccaagcaagaaatagaaataaaaaaaaccttaccaacaacccattcgcacccccctcagtcaaaaacgtatccgcaaccgccacatccgggaccattccatagtaccgcataacatcccttacactcgcatcattcgcatccgggttatccgaatccacattcccagtaaaagtcgaattcacatccggatgaagcttttgccaaatcacccaccatcgatccaaattcgtatgatggagccagaaaatggggtcatttacggatgtgctcaacccagataaatcccctccaaaggaattgtgaacgttattatgggggtgagcttccagtgttcttcgaaaggcgtcaaacgtggtgtgtccgacgatccattccatttcaatgggactgtattgggcgcccatcatgtcaccatctgtttcgcttccattgcggaattggcgttggaggcaatgagggtctggaaaaacggcggtcgagtttgcgaatacgcccgttgtgaggcagtaattggaggatggggatccgttgccgccaaagtaggttggagaaaggaggggggagagatgcggggattgggagtcgtaggaccagtcccagtatggaaaagggccggtgtagttgcagagggctgtcaaggcgtgttcgtagatgctgagaaagatgcggtgccaggggagaaaggctgcctatggaaagtcagaaaaaagtgatgaaacatattacagagagcaagatgtatttgaaaatgtcaaaacgtccacccaaaatcaatagatactcaaatatcctgatcaacagagtgaatttcacattattcgtaccgtgttatgagcggcaggcacattctgcatatgaacatgaacgaaatcatcatacacggaacgactgtctggaactcggagcaagctaggtgtctcccgtaaacacacgacagccgacaagtaggctacccgctcttgttcagttaattcgcgaaactctttgcggaccttgacggtgttgcatgaaaactgagaccatagaatggatggttgcggtgcctgaggggagggttgagcgaggagaatgggaataaacgttgtgagcaagagaatcaagagcataatgatagtttttataatgtttgcttgtacactcttcccccctcgctcagagacatgtaaaaactattgaatgaacgaggtttcacgccctttttcaacaaaggctggaggaggagggggaaaaagaaaatggtttatcactcggacctttttttgacaatggaatctaggataaaatctctaataaatgctacacccattccatcctgctttcataggagatggcaatgtcagatggatgatgacactctctggatcgaaaattccttgcacgaattcccttccaaaaagccccccccccctccacatacaagttgtaaaaagtaccttgaataaatgacatgttctataaagcgcgagattgggcgaagcaaaagaaacaaaaaaataacgtgtatttcccttacaaacaaaaacgtagtagtaatagcatgacgaatgtgaaaggatgtgatgcggaagagagatctgaatgtccctactgccaatgaacgccttgtccctaacctgcaaccgtagagatttgtcaagcctttggagaagggtaaagtacatcaaagggacacgacagacacacgcagtagttgtcagtcattttgccctttttgccgtgtgtaaaatgcaagtatgcgcaaacgcagatgctcaacatggacctacttactaggccagatctaaataataataaaaacagctgcttgaacaccttgtagctaacactcttgctgacacttttgctgacactattgctgacacatggacaatcacgtgacatcattcatgtaacccgatatggacagcggctcgtggccctccatttgggccaacgtgggaaaa

SEQ ID NO: 4670 - DNA, 1536 bp, Spizellomyces punctatus
  source 1..1536: mol_type = other DNA
agaggttttgggttaaaactacggctagccaagattcccccctcaaaaaaaaaaaaaactttcggccccggcctcttttttttttttgttgcttttcttttgacgtatactaggttttgacgggtttggaaaactggctctttgctggcgtaacgttccggcggtcggttttttgtttgcgggctcactcttgcttatgttttccattattgaaaaaggtctatcagatcaacagatttgggattcaaactatactcgtcatgatagatcagagtgagattatactcgtaccccaaagatggaaaactatgcatgaatgagttcagaaccaagagcaaggttctggtgaagactttggaggaggaattccaagtgtacatagtgtggagctgacagaaaatggcactaggacccattattatccggatcaatccggttaattatatcgcataatcagaacccccatcgctgaaagcagcctgctaatgttctccaaactgcggtgtggcatgcatgtaatgttttttttttaaactacggtgagctggaaccagcaacaatcactcggaaccaacaaaactgctattatgctattatgctgcctaccacaaaactactattaggcagcatagtagcataatagcagttttgttggttcccgggagggcgaggtcctcggcaccaccacatctgcattctcatgattgaccggagtcacgatgagagttgcgcagatggtttgagagtcgaggatgggtaaagaggaaagagggaaaagaccccccttttatagacgttcggcatgcgcctcaccgcagtttaaaaaaaaaacattacatgcatgccacaccgctttgagcaatagatgggggttctgattatgcgatatgattaaccggattatccggataataatgggtcttagtgccattttcaattacctccccactatgagtcgttctacctattgcatacgtaagcatgaaacctgtgtttttttttttcttcccatcgcctttgttcccacacaagatattagcgtatcgtcgtcgtttaatttgtcgttcaactcactcaaacacaagatggctcaactcccaggttccattcttatcgccgagacgttcccattctgcgtcaacggatttggacgatgctgctatactctcccccgttcgatcgaacgttaatgggagatttgttctggttctgtcatgtcctcccggaacgtcaaacagaatcgttttgccagtatgtcgtatatgtcctgtgtgatgataggaattctaatgtgttgtagatcacctccttgagatcgagtcttgtctttgaaaagtatcattgtcagcatgaaagggcactacgaagaacgttatatccgctaggcgaaactcctgcacatgatgacattcaagctattccacttaccgccccgtacttaaaggtcccctcatatttgaaactggcctcaccggtcacacttgatgctgggagtctgcatattccccatgaaggccaatttggaattgagagttc

SEQ ID NO: 4671 - protein, 119 aa, Spizellomyces punctatus
MSSGVGVQDSAVEAFQELKLKKKYRYIIYKINDNNTEIVVEKTVESADYEDFVASLPADQCRYCVYDFQYDTAGEGIRNKILFYVWSPDTSKIKQKMLYAASKDALRKKLDGIYTEIQC

SEQ ID NO: 4672 - protein, 112 aa, Spizellomyces punctatus
MLDTPREHTEPSFSGPVPPIQVPAAPWASNTKVDSLKAKDIPEFTGKRNQDVEEWLNKVQLLQNISATSDARMVQLLLAMIAEKTPADAWFYTLEAQETHSWTWKRWKEELL

SEQ ID NO: 4673 - DNA, 3475 bp, Spizellomyces punctatus
  source 1..3475: mol_type = other DNA
tgcactgaatttcggtgtagataccatcaagctttttcctcaaagcgtccttgctagctgcgtacaacatcttctgcttgattttcgacgtgtccggcgacctaagaaaaagaacgacccgacatcaaccccgaattgagatgaccgtctgctagaggggccaatgaaaatatctttaacccacttaccacacgtagaagaggattttgttcctaattccctctccagccgtgtcgtactggaagtcatacacgcagtagcggcactgatctgctggcagggatgctacaaagtcttcgtagtcagcactttccacagtcttttccaccacgatttcggtattgttgtcgttgatcttgtaaatgatatagcggtacttcttcttcaactttagctcctggaatgcctccacggcactatcctgaactcccactccgctggactacagcaataaacaagacggttagaggcccagtatcggcaaacgtgcatttccctatcgccgaggctggttccagtatacgataagtccaaatccaatctccgttatttccgggttcaattttcccattcccatgaagaccatcttggcgcgtcaagatggtcatgtcactttgacattgagagtcgccaattgttgcctgcatcactctcatccacctgtcgcataggatggatggatggatgcccttggatggcttagatgtcttcaagttgtccggagagatgcctccagcgcgcttgacgccatccacgatggccgtggccatgatcgctcaatttaccaactctgatgttccttctcatatgttacctttactcaccattttatgtttgatgtgagttcttcgggaagatactgaagaaaatgtcgagaggaagcggtattaggagtcgaaatgcggctggacgatgcgtgtgtgagtgttggagttggtcaatgttacgcgtccaatattatcgcatgcgtgtgatttgagcggcgttttgtgatgtttatttttgggccaaactcgactagttgataatatacattgcagcaatagatactattatcgtcccaggaatcatagcctttttttgaaccgttaacatattcatcacagatgtattcaagtagaatatggcagaagctatcactacttctcagatgtcatctatttttccagccaaacttcaaccatgtgtgagtatcttcagatccaagaggcgatggtatgcaataatgtggtccataagagtacatcttgcatccatcgattattctgccgctggtaatgagctgttctgttgatcgattgtctactatgttccatctgatccttcgttttttcgtcaatctcatcaccctattcgactccaaatacgtccaagttcgacaatgcaattgtgctggtgcaataggccaccctggcctctccattcgacatgcaagttactatagttcactggcttgattgcagggatatatccatagtgtggaggtgattgaaaatggcactaagacccattgttatccggataatccggttaatcatatcgcataatcagaaccccctctatcgctcagattggtgtggcatgcagcggtgtggcatgcatgtaatgtttttttttttttttaaactgcggtgaggcacatgccaaacgtctataaaaaggggaccttctccctcttccctctttcctctttacccatcctcgactcaaagcatccgcccaacaaatctcagtccaccatgagaatactgctctggtgccaaggacctcgactgcccgacagcaactgtgatcagaaccagcagcaaccaatcggatccgataacaaagctgctattatgctgccacacttgttgagcttggttggtatgtattgatggcattttgtagcgaatgactctggtaaaccggttcgcttaaaggcatcaggtaaccatgattgaggtttccgcaattgcaacctaagcttcgaaacccctgagatcaagctcggttctgggctacaccagcgcagcacaaaggatatgttatgcaatcataattgatcatggcaatgatcggaaacgggaatatcggacaccgccaccctaataaaggttatggaaaccagtgtagatgttaccatagtatattcttgtataaaaaagacgaattcaataaaataagttgggggcagaagccgtagcaacactaaatccccacaactagcttctcaactccaatcttaggttaacaggaacctaacagagcacttcaatggcctgatcacccacactgaagcctctaaatcctgctcagttcacaactaactgactctccttgcctctcaccctcaagtcactaccaacacccaaagaaaggattcagagactacaattcctagtacagacacccacataacctgctaggagacccaagttgtctttaccatagtctaccaacaaaaaatccattacatggtggagaagcacgacgaactgccttcccctctcaaattcagctgaaaaccttattcagtcataccgaaactcttgcgcaaaccaagatccactcaggtagctactcagaaaccttttctctcatttcggaaacagacttcacaaaaccaagaatgatgccagtcgaacactcaccaacgtgaggccgctcacctgtgatccagactcatagtcagggtcctgcggaggacattgaagtccctcctgcaacacgcctgaggcgtttggggaccacttctgtcgaaccggaagcccctaacttggccacaatggcctctgaagtggcagcattaaaagaagacattgcccgcttgactgctgcaacacagttggcaactcaaaatcttatggaacagcttcataggctttctgaatgtcagacagtggtggatgagcaccttgcatgagccttagaagccctagtgcatcgcccactgcccaaacaacctctcatagcacatgctacaagagaacagtctgcaaccccatgggaaatgttggacacaccaagggagcatactgaaccaagtttttcaggtccggtgcctccaatccaagtgccagcagccccgtgggccagcaacaccaaggtcgattccttgaaagcaaaggacatacccgagtttacaggcaaaagaaaccaagacgttgaagaatggcttaacaaagtccaacttcttcaaaacattagtgcaacatcagatgccaggatggtacagctcctgctagccatgatagctgagaaaacccctgctgatgcttggttttacactctggaagcccaggaaactcactcgtggacctggaaaaggtggaaggaagaactgctttgagagttccgagaccccctaaccaagtccaagtgcaaaaccaaatatgtgcactgccatgtgaaccccaaagaatttcgcagctttcttgcattcattgaccacaaaactcatctctggcaccttgcatatggtgactgggcaaac

SEQ ID NO: 4674 - DNA, 1211 bp, Spizellomyces punctatus
  source 1..1211: mol_type = other DNA
cgagacctaattcgaatgggcgatccttcggaagccggcattctttcaaatatagaagaactcagtacacacctgctacatgcaaccacacacggtacgatacgaccatcgcaaggcctaggcgcctaatttacgtacaacggacaaaatgcttttcaattctacgttgatcgcctcagagcgtctcgcaattgctgctcggttgaaatcagttgatagtggactgttgccatgcagctatatcaccgcggctattgcttgtaccgccattctgactgtgggtatccttattgcatttttctgtgagaagaaatctgcccttgcggaggagggagaacaatggaaacggacggatggtagcaacaagccgtcgaatgcaactctcccgttcgatacaaaaacaatacatacgccaatacaaacaccaaagaagaatagaccaatattcacccggcactgcacaccagtggtttaccccactgtgaaggtgccaccatcaccatccccactgtatgatattgacattgacgaagcaattttgcgctcgccatcagtgtctacgtcagccctgctgttaagcgaagattgcgtggctagcccccctctctcggtaacaaagcgtctcgcaacccttgtcacgaccccggctaaatccgtatggcgcgctctgaggcactcggagcctgatgcgagcccgtttggtccgtgctactctccaacaactgctgcgtcacccattttagaggcggaaacgcatggggcctggctggaagatgaggagaacgataatttggaaggaatacctgtgagacgaattgacgagtttttgcgtacagggttagatgatacggaggaaatttgggatattcgatgagctgcagagaagaatgcatgtagatttttttaatttggtttatttgtacagatcgatcctaatgaatgcaaagctcttctttaataatactcgcaaatatgttgcttggtcgcgtctacttttgtcatttccctagatataatcatatcgcataatcagcaccccctctattgctcaaaacggtgtggcatgtattgtaatgttttttttttaaactgcggtgaggcgcatgtcaaaggtctataaaaggggggccttttgctgtctcttccctctttacccatcctcgactcttgaagcatctgcccaacgctcacgcagcactctcaagtccacc

SEQ ID NO: 4675 - protein, 245 aa, Spizellomyces punctatus
MTMTSPSTPPNTLKTPLKTQFAVDLHCESCVKTVKTALSPLNGIRSLDISVPNKTVTIEATTPPSLLFRTLRSTGLNTVLRGQSSSAQHLGAAVCIFESFPGAKGWAQTNNKGLARMVQVDDETCLVDVTVDGMPPGELSVSLHECGDISGGCESTGKALKEFGKLLVDASGRGDLVVESGDVKVWDVIGRSIVLEKLQSSKQSGVPKSDSVCGIIARSAGVFENPKTVCSCSGKTLWEESTAHI

SEQ ID NO: 4676 - DNA, 721 bp, Spizellomyces punctatus
  source 1..721: mol_type = other DNA
tctgtgccgcttcggcccacatttttgcagcaccgaaatagaatcctgcctcacgtgccatttcaaacccacgttcagtcccagctactcttccttcggtatgcccagcatgtatcccatctcgcaacccatcctcacggcccagctcctcgaaccttgaatgagcgaatcaaaaataacagctccatcagtaaaaggcatagtcctagagacgcctcccacaaaatgcaacagtgggctaggactgatcttatcgtataaaaattacattgtttccaggtgaatcaaatcgtctagtttaaaatctccctgtttaggtctgctagctgcttggaagctgctcgtccgctcgaagacttctgtgaacgtgtctataataggtacttgctgcccacaaacttcgatcgaggtggttgttgtggcttcgggggggaaaggtaacggagcattgcccggacggttggtgatggctacctggtaaccagcctgaatggcagcatcgatttctgaaatcgtaccggtaggtgacaggcaataggcaattgagagcgtcacctcaatatacctttgatgttgtcactgatgaacaagatccgttcaggggcttgcttgatttcatggctgattttcacataacttgctttctcaaccttcaatcccactccagtgtcaaagtgacctttgaagtactgacagtagtatgataggacaattaacaaaa

SEQ ID NO: 4677 - DNA, 1790 bp, Spizellomyces punctatus
  source 1..1790: mol_type = other DNA
atgagaatactgctctggtgccgaggacctcgccctcccgacaaaaacaacataacgccttgcaaacgctgctactactatactgctacgattgcaggtatgcattatctttatgattgttcccacgcgtattcctcagtctaagtctgactttactagtatctgaacatcctccgactaaagaatttcggaatcaagggcttagtacgatttctctcgtgtggtgggcttagttacccggttagaacaaccgtgatgttatcgcatgtgtaattaggcctagtggtagttagttagtggaatcgagacgttaatgcggcaaggacatgaacgagaacaacggagaacgcccttgctgctttgcacgtaccccagttcaacccaggctggaacctgtagcgagttaggataggggtgggactcatttgcaggataggttatgaagggttggacaggctggctaattgtacattagaaccggttgtagtgggttggagggagaatgtgtccctagtgacattttctaccacctgcacactaatgatagatatgaggttaattgagcggtactgcgcatatgatcgctgtcatggcaacaatggatatatggacctgtttgtcagcatgatagcttcgattgaactagcttctccattcgaatatatacatgacaatgacaagtccgtcaaccccaccgaatactctgaagactcctctaaagacgcagtttgccgtggatctccactgcgaatcatgcgtcaaaaccgtcaaaaccgcactttcaccactgaatggcattagatccctcgacatttcggttccaaacaaaacagtcactatagaagccacaacacctccctctctactttttcgcacactccgttcaactggactgaacaccgtccttcgtgggcaatcgtcatccgcacaacacctcggtgctgctgtctgtatctttgagtcgttccctggtgcgaaaggctgggctcagaccaataacaagggcctcgctaggatggtgcaagtggatgatgagacatgtttagtggatgtaacagtggatgggatgccacccggtgaactctcggtctcgctgcacgaatgcggagatatcagtggcggctgcgagagtacgggaaaggccctcaaagaatttggtaagctgcttgtggatgcgagcgggagaggggatctggtagtagagagtggagatgtaaaggtttgggacgtcattgggagatctatcgttttggaaaagttgcaaagttcgaagcagtctggagtcccaaagagcgattccgtgtgtggtattatagcccgatcagctggagtgtttgaaaaccccaagacagtgtgttcatgtagcgggaagactttatgggaggaatcaacggcacatatctaagttaggagtagatctagtatatagcataccatagcgccgccctgttttgcatcgcccgggtgacaagtaatgaacatactcaagtaacatctagaaattcatccgcggtctcgtattttcatctgccctatatctctggcccgtagcatatgtcccaaatgcggaagaggctactttgaatcttccccgtatccgatcaagcgatgtaactgggtctggtccctcagagtcgtgtgtgttttcaagcgggaagtcctgtgcctgtgctctcagcagctgaacagccttcatacctctgaagaagaggtcttagtatccagctacaatggaaatgagctgatcacggtccgccaaacttaccggtctgacgtctctacgaatcctt

SEQ ID NO: 4678 - DNA, 2366 bp, Spizellomyces punctatus
  source 1..2366: mol_type = other DNA
catttgcgagaggctgatgagagcttggccgacgctgctttccatatgcacaatgggtaactgcgcgcaaacagtcagcttgatactatacacagaaaaggtgggctacaagaagccccaagattaccctttgtccggacgcgtaggggcgagggcaaacgaccgcgggagttggttgctggtttcttgaagggtggttccgcgagaaacgaaatgtggaaggaaggaaagaaacggttcgcttcgcttcttttctttcacaaaccactttctatatttggttacattgaattccagtcgcatgattcgctagcgatttgtgattcgatcagccattcgatcagctcactttttgcaatgcattccatcactcgtttcattattccatttacaggttaatgaagtgtcattggattctggtaggcgattcttatcagagatctctgcggcgttcctcatagcgctttctatacctgccattatgttgttagaaaatattggaccagtcggttgacttttccaggtgctcagcactttgaagaatctctgtttgtcatccgcatcgaccatttcgtaggcgtatttataaaatagaatttagggttcacgcctgtagatccaaagcacaccagcaccgtcacatagtgtattggcaagaactaatgtcacaaacaatacacaaactgagtcgatacattgagtcatggagtgtcatatatgtggcaaactgcagaatattcctctcatagatggccgtcagatggctgcaagggatagtaattgcaatcattcatggccgcaggtattggacccgttttcatgctggccacacatattggacccgttttcatgctggccacacatattggacccgttttctcatgacaacaaacataaatagtggccatggtcgcggcattttctcctttaacccatcctgatatgggatgtcctacatgtaacggcaccgaccatcatcgggcttccagcaaactttgctccttctacaaacctcgaaagaaaaacgaagtacgcacaactttgaaaaggaagagggataccgaccttcccaatgacgaaatcttcattctttcgactgttgtaaaaagtggacaacggtcccctttgcaagttgttatcgcacatgctgcgagaaccttgacttgtatcgctgctgaagccacgcggttgttcaacatgttcgtcctggaccttttggagaggaagcaacaaatccccgagtgtagttacaacaaatttctgcaccaaccattccagattattgctttggcaaaagcatcttccccccaactgcaaacgattcatcgcaccttgtaccgtcaaacatctcgatacgatgttacctacctcagccagctgatctcaaacatggccaaagattacgagaccaactgcatgaaccatgtatcaacaaacattcgcaaatgggctttcaagtggtatcgaatgaagatgcagaagacgtacccagatctcaagcgagataaaatccgaattctgttcaacaaggaagatgacttgaacgagcattctctttacttaaaggcatgcttgatgacatatgacgttgacatcaccaaagaggtgtcatttgaccattggtggacatactttcctttgatgtggaagtttcaaaggtattttgccaagcacggagagaggaatttctccatggtcccaattaccacttacgggattcgccacatccgtctcgataccaatgcactttacaaactgtgcctgagagtggatctattcaccaggaaggatgtacccgcagctgaattccggacaaacgctctcgtttattggaaaaccctgttccccgatattgccgagacgagcaacaagtcatttgcatacggcgtctcgaccgacggagtcgcttgcagttactattaccagaaacgttacgttcggcggcgacagagtcacaattactatggcttcgacgatgacggaaaatatggagcaatgaatttggaagacggcgtatccatcgtcggtgtggatcccggtaggattgacatctttacagctgttgatgggaacgaaaatgttgtgaggatgtccagaaaggaattttactcactcacgggcatggtggcaagtcagaagactagaaaccgatggttaaagaacaacccagcagtccagtcgatcgtaacgcaatgtcccacaccacgcactccagatattgagaactttcgacaacactgtcaatatgtgcagcagcatctgttaaccttggtcgacttttacggagcgcggcggttcacccgtcaaaagttgcacacttacattggcaagcagaaagtctgggctacgatcgtaagaagaattac

SEQ ID NO: 4679 - DNA, 1116 bp, Spizellomyces punctatus
  source 1..1116: mol_type = other DNA
caagaatgacagacgcacggttgtggcgctgggcgatgcaaagttcagacacaactccaaaggcggaccttcgacacccctcgctaggatggccaaagagttaaaaaggagacaccgggttcgaatgattgacgaattcagaacgtccataacgtgttcacattgcgatggtgaattgccgaaaagcactcgacactggcaggtcaaggtacgttgggccgtcatgaattcggtttcacaaaagtgaagttgaatttgtgtgttttgccaggtctgcaacgacttatgtttgactcactggaatcgagacgttaatgcggcaaggaacattcgaaatatttttctccacatgaacgagaacaacggagaacgcccttgctgctttgcacgtactgtaccccagttcaacccaggctggaacctgtagcgagttaggataggggtgggactcgtttgcaggataggttatgaagggttggacaggctggctaattgtaaattagaaccggctgtagtgggttggagggagaatctgtccctagtgacattttctaccacctgcacactattgcgaccaagtattctgccagcaagtgtgtttatttgctgacgtgagccttttgtttataacaaaaatggcggtcccccctttgcgtttcaaatgtggtgggcgccaatgccgttgtacccccgtgtttcaggtcaaagttgttgagtatctcaacatgccccttgcccactttgcgtgcatagggctcgtgtatgcttgaacaaagagcgtgagaaaaaggcagcggggtgctcgttccaccgcccttcccgtcacctttgcacgttcgcagcccggacatttgagtttccggggaattggcgaaagcagttatcctaacaatcgggcggaactcaagaaacctgcccttgtcatccagttgggcaatggccgcaactgtccatacccgcttaaccgatcacgatcacgacttgtattctcgaactaaccgcagcactggaccttcaatgtacgatgctgaagcgtatgccttgcaagaagacacaacacccatcatgacggaggacgaaatgatgcaagtggaaagagaactgctaactgcatgg

SEQ ID NO: 4680 - protein, 168 aa, Spizellomyces punctatus
LFPSLTSGHAILLFPTSRQTGTQMSFTDVGIKIATFPPTAAQLNSCLDSTPVAPQEAFVAGSDVTVKWSITIPHQNPPGVRVAVQYDPQSDFIVLQDNIDVNALSATLSLPADKSSDTAVLQWLWASQEDGGFYMACSDVMIKPAAAGNTGLSPQEPVSPSAATPAGC

SEQ ID NO: 4681 - protein, 467 aa, Spizellomyces punctatus
MLSGFFIFNVKGEVLISRLYRPDVKRSVADVFRIQVVSSTDVRSPITTLGSMSFFHVRHENMYLVGVTKINANAALVFEFLYKVVNLGRSYFGKFDEDAVKSNFTLIYELLDEICDFGFPQNTEAETLKLYITTEGVRSEKAMKEEGSKIAIQATGAVAWRRPDIKYRKNEAFVDVVESVNLLMSAKGTVLRADVSGQILMRAYLSGMPECKFGLNDKVLLEKEGKLGTATAAMPGGGKRSTGAVELDDCQFHQCVKLGNFERDRTINFIPPDGECELMKYRTTENINLPFRVHAVVVELSKNRMEFKVSVRSQFTGKIFAQNVQLKIPVPTNTSGAKCLVTAGKAKYVGSENALVWKISRFQGQQEYLLSAEAELTPTTNKKAWSRPPISMDFQVLMFTASGLMVRFLKIFEKSNYPSVKWNTVTLTPALHRSFKILRLVLQYTVVPQPGYVRYYCVITVGVIGKS

SEQ ID NO: 4682 - DNA, 3309 bp, Spizellomyces punctatus
  source 1..3309: mol_type = other DNA
cactttttccatctttgactagcggacatgccattctacttttccccacatctcgccagacgggaacgcaaatgtctttcactgatgttggaatcaagattgccactttcccccctactgctgcacagctgaattcctgcctagactcaacacccgtggctccccaggaagcatttgtcgccggcagcgatgtgactgtcaaatggagcattacaatcccgcaccaggtagctattggatggagttatcgagccccaatgttctaccttggttgaacgacattcattcacagaacccacctggtgtgcgtgttgccgtgcaatatgatccacaaagcgactttattgtcctccaggataacattgatgtgaatgctttatgtaagcacaaagatggacttcctttccatgagacagcatcttactttttttgatgtagcggctacactgagccttccagcggacaagagctccgacacagcagttctccaatggctctgggcttcgcaggaagatggtgcgttttcactgtcgtgtgactgataaccttttaggggggttttttttaattgtttgaaaatgtaggaggattctacatggcttgtagcgatgttatgatcaaacctgcagcggctgggaatactggcttatcaccgcaggagcctgtctcaccgtctgccgcaactcccgctggctgctgaacccagagcagtcccagtagcctctattgcacctccgggtacagcaccttgaccccgccgtaagtaccaaagacagggccaaagagctatggcagctcccgtttactagaggaaaggtactttttgtacaggttcatttgccttgtccctttcagttgggagaagtagaagtagaacatgtagcattttcattgtacagttttttcaaaattattgaaaatatcatgcttaaagcgtgctaagcgcgatatgcttgaacagcagcattcttgtgcgaaagccatttcgcttcctgaattgtgatttcttctggttgcgattttgagtcttacacgacgtgccgaacaaccaccttgacacacaagcaccccacattctcttccgactttagaacctcccgttcctccgacctttcacgcgtaaacgggttggtgatcgtcaactgacagcgtgcacaccgccagcatttcgcgtgttgcctttctagcgaacccggagcgccatgctgagcgggttttttatattcaacgtgaagggagaagtgctgatatcgcgactgtatcggcctgacgtaaagtgagttgtaggcatgggtgggagtggccgtaagagtagaggacacactgggaaactggcaaaacaactcggtggggcacaggaaagcaaccacgccagtgcccagtgcggaagcatgaagtacacaaagtaccttgaatacgttggtcggaattgcacaggaaatgaacaagcgttgcaatgtgtttgaggtttatatacgttggcaagaaaataacgttggtcccaaggcgttctgttgcagatgtcttccgaatccaagtggtatcctctaccgatgtccgctcgcccattaccacactcggaagcatgtcattcttccacgttcgacacgaaaacatgtaccttgtaggcgtaacgaagattaacgccaatgctgcgctggtgtttgagtttttgtacaaagtcgtcaacctgggacgaagttattttggaaagttcgatgaagacgccgtgaagagcaatttcactttgatatatgagttgttggatggtaaagtgccgtctccacgtccctacttttgtttcgtgattcgaggaaacgagtgttttgcgtcttgctaacttttttctctctcctaaagagatatgcgactttggattcccccaaaacacggaggctgaaacgctcaaactctatataacaacggaaggcgtgcgatcagagaaagcaatggtcagtttttttgcttgcatttatggaccaatgcgaggatgatggctaatgcaacgcaacattccgtttttgacagaaggaggaggggtcaaagattgccatccaggcgacaggcgcggtggcatggcgcaggccagatataaaataccgaaagaacgaggccttcgttgatgtggtggaaagtgttaatctcttgatgagtgcaaaaggtacgtaaagaaaccggaatcaactggttctgactgccttggctaactttacaccaggaactgtacttcgagcagacgtttcaggccaaattttgatgcgagcatatctgtctgggatgccagagtgcaagtttggtcttaatgacaaggtcttgctggaaaaggaaggaaagcttggtaccgctactgcagcgatgccaggaggcggaaaacgatctaccggagcggtagagctcgatgattgtcaattccatcaatgtgtcaagcttggaaattttgaaagggataggacgataaacttcatcccgccagatggcgagtgcgaattgatgaagtatcgaaccaccgagaacattaacctaccattccgagtgcatgcagtagtagtggaactgtcaaagaatcgcatggaattcaaagtatcagtgcgatcccaattcacgggcaaaatatttgcgcagaacgtgcagctcaaaataccagtgccgacaaataccagtggagcaaagtgcttggtaactgctggaaaggcaaaatacgtcgggagcgaaaatgcgctcgtttggaagtacgtgttttgttcccagcattttggacatggtcacccatattaattggcatgatgattagaatatcacgattccaagggcaacaagaatacctactcagcgcggaagccgaactgactccaactactaataagaaggcatggtcgcggccaccgatctcgatggactttcaggtgagtgtgtgttattacgttcttcagtggcgcatacatacgctgaagccatcatttcactttttaggtcttgatgttcacggcttccggcctcatggttcggttcttgaaaatattcgaaaagagcaattacccaagtgtgaaatgggtacgctatatgacgaaacctgggacctaccagattagggtaagacgaacgcaatgtttccttagaatacagtgacactaacgcccgccctgcaccgtagttttaagatcttgcggttggtactgcaatatacagtcgtaccccagccgggctatgtacggtactattgtgtcatcacagtaggcgttattggaaaatcgtagttaaaatgatcataaacaaacaggatggttgcagtttataatttcaaataataag

SEQ ID NO: 4683 - protein, 253 aa, Spizellomyces punctatus
MDPAARLAVNLNVLRRHDSNIVAILDSSSHVVVYDFDQQSSSWTKKGIEGTMFVFQRSVEPFYGLFVMNRLGIENLMVLLSADMEVQLMQEFVIYRKPDDSGDSVQGLWMYETADRTRLYTTLLKYQSAIAGAPPISSAQPQQAYGQPVDIMAMFQRAKIVGPGDATPHGSLPHQSLSQRDLAIPQVTAPPITPQQRQIQRLNDIWQWIEDLPPLPGKGSLSDLEFQRRIARLCQDQVFLDAMYRSYRWERPT

SEQ ID NO: 4684 - DNA, 3640 bp, Spizellomyces punctatus
  source 1..3640: mol_type = other DNA
atcgctaatacaatgcaaattgagcgtgttagtcatgatgccttcatccattgccgctactattcagaaacaatcttcagatacttgtttagaatgtcgataaatactccacgaatcgcgttcacttttatagcaaactgatcaacgcctcgtctgctcaacaacaacgctttcagctcctcttcgtcgacgcgctcatcgagcctctctaacgtttgggtgacacgagaaaaaagttccagctgctcagcttgaagggcggctatgacgttgaggagaatggtttctaatgcactagttcttgctcagaggttgcttaggaacaaaagtccatcttgtaagattgaacttaccgaaattcgtatgagccctcctgtattttcaagtttgtacatagctcttgtaagaaatccgacgaatagctgttagatcccaggctatccgccatgattgtcatatcagctgaaggacaaaatgcaaacggattagaaagggaggcataatagatgaaaataatagccagctcaacctttgataagcgccttaaaatgcagcaagtttaccagaattgctttttcccgaactaggatcgtgggaagttgttctgagtacgtgttatccatctagtctcagggtaacaacatggaagcttgagatgggtgcttctctcgttgaacaaatttgaagaagtgttacctttctcaaatcacgaggttgcaaggaatgccttgaacatatcccaatctttgagaactctccctctagtggtctttgcaggtcgccgtttgcatcaaatatctgcaggtattcttggacaatacagaaggacgtccaaaaatcgtatgctaggcggcctcgtacctaccagagctttaagttttagagttttctttgtcccaggaatatttgttgagggaatcggttgtgctccaacatccaccctggaaaaagaaacagactccccaaggcttcgccggtgcatggagtctttcggaggaagagctgttgaagagcgttcaggtggcgtaggaccggaagccgcagcgtttcggggttgggaggtctcctttcctgaagtatctaacttcaaagggcgggtcgaattgaaacttcgccatgcagtacaatcattcatatatggcaactgcgttctggagcaaatgactttctcagagcgcacgactgtagtccgttgtataaggcaatttctgctggatcgaatacgaccgatcagcgcggggaggaatcggggaaccgacatgttgctgtgcggatgagaccggcacaagcagatataaacaggaggagaggcttggtttccggccgcaaatgtctggaactgtactgcaaacgctcatgtggcagaccatggagtgacgcgaacattgcgagcgctccatctgatgatttcgtaaccaatcccgatctggttgagatccttcatcaaaacgtccaaacaactctcctctatctatgcacttctcgctgcattgctttgcatcaaattcataccatcataatgtacctctagagaaatacctttacagtaacgctaccaggatgtctgtggatattatgatttgtccaccaatttttatgataaaatagtaatttaagcagtgagtaagggtagggaacatagtgtggaggtgattgaaaatggcactaagacagcaagggatgtacttgatcgagcttttactacaccgtaatctcttgcttttgaaatgttacaatgtcaagttaagggacgcttcaagcaaacgaacggtgagcccccgatgcttgctcattccaactaggtctggcgggattactgcagtgaaatgtagcttcgtggtattcccagactctggatgttgcgactgatggcatacgccatggcgctctgctgcgccacaattgctgaccacacaagcagtaggtggatggtcttcgcggttaacttccgattctcataaattccaaccatggacccggcggcgcgacttgccgtgaatttgaacgtccttcggcggcacgactcgaatatagtggccatcctcgacagttctagtcatgttgttgtgtacgattttgaccagcagagctcaagttgggtggggaacgactggtgctcttagatctcaccgtctctgcgttctctgatggcgtcgctgtacataatccacctacagactaagaaaggaattgaaggcacaatgtttgtctttcaacgatcggtggagcctttttacggcctttttgtgatgaaccgcttgggtatcgagaacttgatggttcttctcagcgcagatatggaggttcagcttatgcaggaattcgttatatatcgaaagcctgacggtgcgaagcgtttgattaactttgagaatactatgtgcaaatattgagcattttctcattctcggggtagatagtggcgatagtgttcaaggtctttggatgtacgagacagcagaccggacaaggttgtacacaacactcctgaaataccaatctgcgatcgctggggctccaccaatttccagtgcacagccgcagcaggcatatggacagccagtggacatcatggcaatgtttcagcgggcgaaaatcgttggacccggagatgccacaccgcacggatcattaccacatcagtcgttgtcgcaacgcgaccttgctattccgcaggtatgaacgaggaacacaatggcctcaagttgctaatataggacctacgtacttactgtgaatattgtctcttcccaggttacggcgcccccaattactcctcagcagcgtcagattcagcgcttgaatgatatctggcagtggatcgaagacctcccgccgttgccgggcaaaggaagtctttctgacttggaatttcaacgaaggattgcgagattgtgtcaggtatttcaagggaagtctttgcattctttatcctttgcatttacatgatcaacaggaccaagtatttttggatgcaatgtatcgaagttatcgatgggagcgaccaacatgaccattgaggagtcttgtatttccataggcgtagaacctatttaatataggcttcatcgacgactgaagatttgagccaatgacttgttttatcccattgatgtacactgcctgaaaggacacgttgctttgagtcagttcccgtccccaacaaccgagcgttgcggatttcattcgtggagtttcaacgcgcctctctccagctctttgttctgttgcatcatcaagagttgtgatctacttaccagcatggcaaactgaaggaaagggccccctgttcttgctactgatgttgcagggcatagtctctttgttttttcccgcaaaacacatacctgtacagtattgctgggcttgttcaatcgtcacgacctgactgtggatctttcgacaacctttgtcataccatcacccgctgtccttgctccagtggttcgataacttattccaatgtacatgtgatcgattcccgctcttcatagacggagtactttcgtcgtgcggttcattcccgttggtttaggttgcgttctgatttccactcgtgtcatactgtcgactgtaccgggaacgcgctatggcattgccttcccaattgaagtcttggtgagctcgcggacctgagtcc

SEQ ID NO: 4685 - protein, 389 aa, Spizellomyces punctatus
MSAPPPLPPRTKNGTSNNDHPTLSPFYATSLSSYQSACQREAELYEQGHVAEAYQIFQAFVEEEGKKRRQFYGRGLEKEPRAVNKVEAVRFEGDEAQKERVPSDPSTPTLDVKEGQGAHANVADTTALTNSDDRSSVNKEQQNENPEPRPTLPASQDLASALDRAALLTSDPPTDLVDLMNKVQEATTQACTLSNLDRRWEFQSGEDSITQNLDSEASQRREANNNALKAFYGRSDWSGANTLQEAFEQNEKQIRLQNERDALERWRLGYFVPTLDRLAQTSQEIEALYANLKSDPKAIHHILTTLQRTHDTILTLISTTHDVNADWQRRGTSSPSLWLLQPTTPGIKLVRPTRPLRLRKREPGYAWTLKSMPSFKHTWNGSRTLVEIM

SEQ ID NO: 4686 - DNA, 462 bp, Spizellomyces punctatus
  source 1..462: mol_type = other DNA
tcgctcgagggcatcgcgctcattttggagccggatctgcttttcgttttgttcaaatgcttcctgtagagtgttggcgccactccaatcgctcctaccgtagaatgctttaagagcattgttgttcgcttcacgtcgctgagaggcttccgagtctagattctgcgtaatggaatcttccccagactgaaactcccatcgccggtcgaggttactgagtgtacatgcttgcgttgtggcttcttggactttgttcattaggtcaactagatctgttggcggatccgaggtgagtagagctgctcgatcaagtgcgcttgcaaggtcttgggatgccggtagtgtagggcgcggttcggggttctcattctgttgttctttgtttactgatgatctatcgtcagagttggttaaagcagtagtatctgcaacatttgcatgcgccccttggccttctttcac

SEQ ID NO: 4687 - DNA, 1742 bp, Spizellomyces punctatus
  source 1..1742: mol_type = other DNA
agacgagaatgtttaaaagttgtagttcaccattggatatgcagaacccgtagaatttggatggttcatggaggacctatacctcgacagtaatatagtagatgaccttgtcattcacccaggaacaaaaaaaaacaacgaatgtacgaaatgttacagctgccgggtcctgtttgaatgttggtcagggggggatgctatccaacatgagacgggtacaaaaaatctatttttgcgatgcctcctccgagattcgaacacgggaccttctgcttactaggcagacgctctaaccaactgagccaaggaggcgtcacagttctgtggctcttgttaagatctgtagagacagactttcgtgaatatctctagagacactcgtgcgcctatactcttcctggcatcgtcaaagtcatcccagacatttttgtcatcacagtaccgtcggtatggatcggcggctaatggaaacagagtctccggtatgacaaagactttaatacctttgtagtggttccatttgcaatagttcctttagtgtttttaggtttttgagtccggtcacctggtgtgcacacgaacattgcttttcttcttcaacggcatgacatgaagaaagatgttgatcattgtgcaccccatcgtaaaaggtcagttcggataattcgctaacttttccaggatctagatccggatttttgaaggcgtatcctaatcttgtcatttcgccattgttcaattgacaaatatgacatatctgatgggttgagctttaagtaccacggatatgacgaattcacaagttttatcgataacatgataatttataatgatgtcaaatacatttatctaatgtaacaaattcgtaacctttactcctcagttgtcaaatacgtttatctaatgtaacaaattcgtaacctttacctcctcagatgtcaaatacatttatctactgtaacaaattggtaacctttgctcctcacgtagtcgaccaccattttagtcaacattacattgtacggagtgctgctatgctgtaagctaacgtgtccatcggttgccacatttgcattgtctaaattatacttgaaagtggcaaagctcgaatagacgtctttcaacagaaaccaatcgtaagagtcgatgttttcagaaaaattgatgtacccgagatctttcagagttttgtccacttctgcattcgtcgccgaatggggaggacgcataatcttaggtttcggaaggccaagttttgaaagagaatcttcgatactgatcatttcggagactacttgagtttggttcaaactcgtcaaccaaggatgtgtgtaggtgtgacttgcgattaagtgaccatcggaagctatccgtctcgatacgtttggataaatatccaccccgaccggagatccatcgaaaaaactggtcgcgttgccgtttacaaaaaacgttgccattactttttgagaagatagataatctaaaagcgagctcgtatactttgagggcgcatcgtcgaaggtcaaggcaaataatcccggcttgcagatcgtatacttcgtagcataattgttgttgttgtccacaaggttgacgctcgcttttgcagtcaccacactgccgagctggaaatacccgtccaatgataaaccgttcgcaggtagaggtagtggatatttcaacgctacttgtactttttgtgtactgttggatccgttgaccgttttgactactgtgcc

SEQ ID NO: 4688 - DNA, 1444 bp, Spizellomyces punctatus
  source 1..1444: mol_type = other DNA
gtccaaggtcggggtggaagggtcactcggaacccgttctttctgcgcttcatctccttcgaatcggaccgcctcaactttgtttaccgctctaggttccttctccaaacctctgccataaaattgcctccgcttctttccctcctcttctacaaatgcttggaatatttgatatgcctcagcgacgtgtccttgctcataaagctcagcttcacgctgacaagctgactgataggacgagagagatgtagcatagaacggagagagggtgggatggtcgttgttgcttgtgccgttcttggtccgtggtggaagcggtggtggtgcagacattctgctcaaattcgtagtgcggagccggtgggttctggcactagcacccgcaccagggaatgaaccggcgacaaccggttcggaacctaatttccgctacggctggaacaatcctcctgaactcgtctggtctgccaggtccatctaccattcattgcaaaagacttacattactacaccgttacagtgaccgggtgttgcaaggcgtgtggcgtatcctggaaacccaagaagctgttacttaaggtgccagtagcgactttaccctttcaaaattcttgttgggtcctcctgaatcacgacagcggcgtggcgctgctctgcgcggtaacatagcagccacatctctctgtcacaatcaagatgcacctttcaatgcttttttccaaccttcttgcgggtccagagatttcctttacgaagccttaagaatcgagagattccttaaacagagtgagttgattttgtatccaatcattagaagaaggcttagggtggcattattataattatggcgagccaatgaccatactgttggggttcggtctctcatgatgcacatcacttttggtgctgacatgtcataatgcttattggctctgtttccacatgatattatcattgcattgagaatttcaaaaataaatgcattggtggtttagtggtataattaccgcctgccacgcggtagacccgagttcgattctcggccaatgcacaggttcttttgggtctaatgttttttgctccgttgccctgccgcctagacgaccctatcaccggacacagtacaacattgcaaatgatatttcatcctctcgtcggttactcaaattttccaatctctccaacctagtcatcattgaataactggctttaaccgcatactttactctctccccatttgacgtttacagtcgtagatcaacactatggctatccttgagaaattccacaatgtgatagctcttgcccaagtgactctcaacggtcgacacaatccccgttacaaaacaggaaggtgagttattgagaacagaaagtttcctttcgcaagaagaagtattgcaaaccgcaaaaatactggcaaacatacataacatttcttccc

SEQ ID NO: 4689 - protein, 263 aa, Spizellomyces punctatus
MDPDKEKKLDGERLNDCVLEGLPEKQETAYRKPEILEGLDPHIALACLPSPLPSPPAGVDINDPLQLGIHYHDTGDMSISAHYLSISARQGHAVGMYLFAMALRHGWGCTQDMPEAVRLFERAAGIVLEALPRLQVEGADAGTGFDWGSGAEGQIEKNILPSLPEAAEEEFSRRHSITLPSQSPPLSRAASLDRLPSQSSGSSSEGEYSPESPLTATSPPISPTTPKWKRFSLASLTFPSLRRASTGSPNVPSPITLQSDDAN

SEQ ID NO: 4690 - protein, 241 aa, Spizellomyces punctatus
MGVAAPQLIYWWRYRSLPFPHWLGPPQVVRGTLKSNAPIAILRTGFFGRGNPIGGVGHAIRASRVRFGLTRDLSKTSSSLQTAVFPPLKSEGGLTTKSIIHVGESGKLINRISNVLEPLQDLDLAIEGSSIVRVLPRMESGQARSPNLEDVHMTPFNAGVLEPGEGGRRGNPTYFPPTGIPPAEQVSAGESGSFMPRALRQFWDGDVAHKDPPEGDSETKASQWVLDIEKDIVDDLSGQAR

SEQ ID NO: 4691 - DNA, 3059 bp, Spizellomyces punctatus
  source 1..3059: mol_type = other DNA
gaattggcatcatcgctctgtagcgtaataggtgatggtacgttgggagaacctgtggatgcgcgccgaagcgatggaaacgtaagcgacgcaagggaaaaccgcttccattttggagtagtaggggaaatcggaggggatgttgccgtaagtggagactctggactatattccccttcagacgacgatccagaagactgtgaaggaagacgatccaagctggccgctcttgaaaggggtggcgattgacttggtaatgtgatagagtgcctacgtgaaaattcctcctcagcagcttccggaagactcggcaatatgttcttttcaatctgtccttcagcgccgcttccccagtcaaatcccgtgcccgcgtctgctccctcaacctgcaacctaggcaaagcctccaaaacgataccggccgccctttcaaacaatcttacggcctctggcatatcctgtgtacatccccagccgtgccgaagcgccatggcaaacaaatacatgccgacagcatggccctgtcgagccgatatggagagatagtgcgcggagattgacatgtcacccgtgtcgtggtaatgaattccgagttggagagggtcgtttatgtccaccccagcaggaggtgagggaagcggagatgggagacaagccaaagcaatgtgcgggtcaagtccttccaagatctctggtttccgatatgccgtctcttgtttctccggtaaaccttccagcacgcagtcgttcagacgctctccatccaactttttctccttgtcgggatccatcactttaggttaaaagtccaagatttagcgcctgctcgaaaatcaaatcatgacaccaactccttgaaacggtctatcacgtaagctcgatcacatgaccttcatcaagggccgatcacctttccgtttcctgttgatctgctcagacgggcgaagcaaagcgcccaatatctgcaaaatatcaccgtggtgaagtggaatgaagggttggtcgtcagaagtataaaccaagaagatatgctgcggaggactgtgtggtctaatgcttagtgtgtgggcgactgaaagtgtcactaggtcgtcatattttaaatagccgcggtcgcggcattccctccttagcccatcctgacatgggttgtccaacatgcaacggcaccgaccatagccgggcatccagcaaactttgctccttctacaaacctcgaaagaaaaacgaagctcaggcgggtttgaaaaggaagagggataccgaccttcccgatgacgaaatcttcgttctttccactgttgtaaatcactcaaagttcatcgcatgtgtaatctacattaaactatggtgtaaaacacatataccgcattattatcctgtgcgattcacaccaatttccatacgttatcacaatatacccatttttggtttaaattgcgggtttgccatccattctcccacatcctcgtgcctccgaatcgtcgtcccagtcgattaatcgctaagcgagtcttcctcatcgaatcggaaatctaggattactgggttgcctggatgactccaacaagccaaccaccgatagggaccttgtccttccgggagttgatgatcgggatcccagtatgtgaaaaaagataaggatcctctccgggtgttccccaacaatgcttgcgatcgggacggagagcgcacaccctggttgccgtggacaaccacgagtatttcctactatgtaagtgccttgtccttttccccgtcaactgctcgcaggtgctgagagaacctggtttttaggactttttattttatagcgtaccgaggacttacaagatatcgttcagtcgagctaaaattgaccaattcatggttaaatttgccaacgacgatgagattggcgccgactgcggcacttacagcaatacaaacaatgggtgtgatgttccgaaggggactcctcctgtaagtattaccctttctttctgcagcaaacgtcatgttgagcggaatgatgaatgcatacattgcttttatcaatactttgcagggcttgcttgacgaagtgtctgatcatagggctgtgtacgtgccttcgttatcgtatatgtacgggtcgaagcggtacatgttgggctgtgaaaacgatttcctgtttttttttgttttgttttttttttttttctgccttgtaaatgctgcttggaccaatagagcgcttagtcacgattttgtcagcgcttagtcacagtcggggtgacccaaagttaccagtgaactctccatcgccatgctcgtccttgggaatggcggaacccacccctcagttacaacatctacctcgcttgcccggagaggtcatcgacaatatccttctctatgtccagaacccattgactcgctttcgtttcgctgtcaccctcaggaggatccttgtgcgcgacatcaccatcccagaactgccgcaatgcacgtggcatgaagctgccagactcgcccgcactgacttgctccgctggtgggatgcccgttggcggaaagtaggtggggttccctcgccttcctccctctcccggctccaagacgccggcgttgaaaggggtcatgtggacgtcctccaggtttgggcttctagcttgcccagattccatccgaggaagaacccgtactatactgcttccttcaatggccaggtccaggtcttgcagtggctcaaggacattggatatcctgttgatgagcttcccagattcccctacatggatgatgcttttcgtggtaagcccgccctcactcttcagtggtggaaagacagcggtttgtaacgacgaggacgtcttcgagagatcgcgagtaagcccaaatcggacgcgggaagcacgaatcgcgtgaccaactccaccgattgggttaccgcgaccgaaaaaaccggttcggagaatggcaattggcgcattagatttcagcgtgcctcgtacaacctgtggaggcccgagccagtgcggaaaaggaagagatcggtaccgccaccaataaatcagttgcggtgcagcgacacccat

SEQ ID NO: 4692 - DNA, 1127 bp, Spizellomyces punctatus
  source 1..1127: mol_type = other DNA
agttttcagagttttggaagttgtttggtgaaggccatattccaaactttgagagtgtcctcgacaccaagctgtctcccttcctcagtccttctgccttctcgttctggaaagaaaatgctggcttcagtaacctcttccagaccggatgctccggattggctattcgggttttccaattcgttatcaagcttcgtggtttaagggacgctgtccgaaggatgtgcagtgctgtcactttggatgagcaaaaacagatctggaaagaagagattcggccccactttttgagcacatggcttattactctccttaacaatgatcgattcctttggggtgctttgggcgttccgccggctcagatgcagatgctgattgaagaaggtgagatcatttcgctgcattaaattcgtgtcagtagcgactgacagctatatctttctatgcaggcacggcgtatgaatacattgtcaacacttttgatcctgtgatcgaaaatacccatcttcgcaccgacaactacttttactacctccctctcatgcttaaatacaaccctcgtaatgttcccgcatatttatctaaagaaggataccgagccctccaaacccaacctgctcgcctcaacgccatcaaaattcacacggacgttattgtatctgttctcgagcgcgaatgtgaggacggagaactgactcgcattattcttatggaccatcttgactggttctcgcacgaggatgccgaagccgagattggtatggtggcccgcaagtgcgctactggaggaagagtctattggcgatcagccggcaagaggccttggtacaatattattttcgagcagaaaggatttgatgtcaagcccctgcagatccgggagggctcgacaatgtacattgatcgcgtgaatatgtatgctagtttatggtgtggaatcaagctttgatgatgggggtttgctcttagatctttttagagagagatgggaaatgggaagtacggttttttttttactttcacttttttgtacagctttggggatggataattacttgaataatggcaattagtgggtgaatgcaagataaaataacgataaatacaatactatttatcccataatc

SEQ ID NO: 4693 - DNA, 839 bp, Spizellomyces punctatus
  source 1..839: mol_type = other DNA
ccgtgagtggatttgactctcatgtgcttcaccaagagcgagatggtgggaaaactttgttggcaaagtgggcagagcttgaagcccccaccagcagcattggagggtgggacggacggtctcgatgcgtcatctgtgacagaaggcactgcggtagggatcggggggagaacctcggcgacgataacttctgcctctcccacggtcaattcgtgggctggactggtaagatgactgcgaagtcgatggggcctgaggtacacctttgtcctgcttgacgggcagcgtgggcagcgggtcaatgatccccatagagcgagggcaatctccgacttcttcagcccatgagtggatctgactctcatgtgcttcaccaagagcgagatggtgggaaaactttgttggcaaagtgggcagagcttgaagcccccaccagcagcattggagggtgggacggacggtctcgatgcgtcatctgtgacagaaggcactgcggtagggatcggggggagaacctcggcgacgataacttctgcctctcccacggtcaattcgtgggctggactggtaagatgactgcgaagtcgatggggcctgaggtacacctttgtcctgcttgacgggcagcgtgggcagcgggtcaatgatccccatagagcgagggcaatctccgacttcttcagcccatgagtggatttgactctcatgtgcttcaccaagagcgagatggtgggaaaactttgttggcaaagtgggcagagcttgaagcccccaccagcagcattggagggtgggacggacggtgtcgactcgtcatctgtcgcagaaggcactgcggg

SEQ ID NO: 4694 - DNA, 1598 bp, Spizellomyces punctatus
  source 1..1598: mol_type = other DNA
ttgataaaacaaagtagaaacgctaatggcattcaggattagagaagttgaatcgctggatatcgataacatccctccatgatggtatcccatgccaatcccataaaatcacaaaacgtacacacaccgatcatttgcaaaggctgttcgttacttattctctcttcacatgtttagacatgggtccgtcagtttgactagaaattgggataactagccatgtttcttccacatccaagtggggctgacattttacttgctttcaagatacttgttttatctagctatttgttactaacgggggatgtgagtacgaaatgttacatggtgcagtgcagtgcatgtcagctttatttatggtaacaaccaaaacctggggtaatgcagactagagtttcgagaagaagggtggacatggggtacatgttggaatgcatagtgtggaggtgatggaaaatggcactaggctggaacttggtgttttgctccggatcaggaagctcccaaagctccctatacaagcggtcttgaatatccttagcaattcggtcaatcacttgtcgtgagttttcatcgcaaaccgccgcaaattcggccaattcttcctccaaacccatctgtgcgtcgtcgggcattccttatttgaaagtttgattggttgttggtgcagagggaatggacatggaatgcatggaggtactggagcaggctttcgtatcgcgcggtgcggcggttggagcagggtggcggcgttctgtctgcaacggctcatgagcttcttccgattccttgagaagaatttccggtgaacaacaaatacttcaaggatttgactcctcggatgcaggacaggttttccggtgttagtaatggcccacgacggtctgactctggcagaaggaggcggagctcttcctagttctgcaacggtttatgtaggcgatatcctgcctacggctgctgccgacgggaagcgaaggcgaagggggatacttgggatagcatatagcatacatctcttgttgatttgaaatagtatttggaaaccgaccaaccctaaccgcaatacaaactccaccacaaaccctaaccctttaggctgtcgggcttgctattttttatccaattttgcgcaaaaaaaggaagtcacatcactcattcccgttcgacagccacccaaattcctttatcctgctcggacgtttttcgggcccctcatcagaagacgggtggcttgtgctcaggtttacctgcaacacagagaacacgttttcagaatccgctttttgcatgcaacgtatattggagaggacagatttgtatgcgcttagacgtattgggcttccgctttttaaccttcggctgactttggtcgtgctaacgcttacggtgagtgcacagcctcggtccggttcaggttgaaaacctcggtgacggtgacttctgcctcttccgcggtcaattcatgaactgtgctggtaagatgatcgagaagttgacggggtttgaggtacacccttttttgcttgcttgatgggcactgtgggcagtgggtcgatgatccccatagagcgagggcaatctccgacttcttcagc

SEQ ID NO: 4695 - protein, 219 aa, Spizellomyces punctatus
MSNASWCDPEYGWPADGLERLPPCQEETLRQIPWALLFLFGVPRLVTLLRGPSPAVPRGTLYWGKLTLAFVLLVLHVGEYLNAYLQGSLCDGPEYLCARVSFWLGAAALLFAIVLHHEEHLRSRVPSTVLLFFWLFTVVAGIVKLRTLVLVGAYARDQVGFALYVSFLGLAIFLFGLENVPKPGTYYSSLDEDVSASPEETANIFSRLTFFWMDPLMKL

SEQ ID NO: 4696 - DNA, 2653 bp, Spizellomyces punctatus
  source 1..2653: mol_type = other DNA
cgagaatcagcacctcatgattcgttgttggtttaacgatagcacctcaccttgccattcttgaaggatgctaactgggaagaaactacctacacgcataatcacttcaccagtcagtattccagtcacaaatccaatgaagtcacagaaatactcttacccatcgttcatccacatcttcacccgcctatctcaaacaatcagcctatatccacagtgtaagaaacccaaagcacacaacctcaatgccctcagcagctaccgcaaatccctctacatcggtatcagtgtcggaagatacggcagatggaatagacgatgggaggtgggaaacagagcgttgggcaatcatggtgagtaaaatatcgcagcagcatcagagctgcttaacgcgtctgatcgtgattacgtaatatggatatgcggggtagattccattatcgaatatttacttcttgcccttttatgctatttcgaagtcggcatccgtgtcgcgctgttacccaagtatgtaggacgtcaaatgtatggagctacacagcatctcaaacagaatttgtacggtggctggcagagaatattgaaaatgcgtcggtcgtgcgctacatgcaaaaataattcaatcgttcagtaataggtatttgtccactatatcactgatagctttcgtcacattcgagagagtctcaaaatgtagttatatttcaagaaggcttagctgaacgaataatgaaaactaaatctgctattttaggttgatatcgaaaattcagggaagaacaaaacaagttagcgataagagcagcgacagaatgacagctcgcacacgagtaatatctctatatcctcatttcagcaaatatggaatcgaaatttgtgagttcaactgaaggatggcgaaactcttattagtcggtcactctccgcgtcgcggagatcgcttgggtaagccagtttgatcacttgtccaccccataattcttggtgagcgagatcgtgctcaacgtacaaatagttcccccaacttaagattgtttgcaggcatgggacacaatcacgggcaaaaaacgagcttcctctctaccaattttgcagacccccacttggattcagcggccgtattgcttggactgaaaatcgccaaatttttgaagcgtacttggaaagctttgagtggtcatagtgacaatcgactcagattttggtcttggataacggacaaccggttcaccagccggataccccaataatcacgcaggtcagaatcaaaacgcaacaagcattaaccgatattgcagcacgaggtaggtcattttgatcgtggccgtccggactctgtagtgttatctatattctatagacttgagcgacattgactcacgtattctccataccctactaatttgtacatcaggatcgcatttcctatcctatatcaatgcctgcacataacaaataataaagattcacatcgctcgcatatctattatcctacaacctgttcatcttgataaacatattattaatagcgtttgttcattccctggtgtagtagctagtgccagtttctgtcacctctacactattattaatatcgtttgagaaactctccccagatgtaaatctttagatgaacgcgtgcaaaaattaaaagatgactaattagaaattttgaactatcctcactattcaaaaagcccaaggacactcgaacatccatagtgcaggccgcgttgtttcattgcagctgttgacatgtccaacgcatcgtggtgcgatcctgaatatggctggcctgcggatgggttggagaggttacccccctgccaggaagaaacgtatgtgtatcccgacgagtcactattggtattttgttttactcaatctgcgaatagtcttcgacagattccttgggcattattgtttttatttggagttccgagacttgtcacgcttttgagaggtccgtctccagctgttccacgcgggacattgtattgggggaaattggtatgaagaaaaccgctgagactcttgcaagaaggccttgctcaaaaaagaacgttatttagaccctggcgttcgtgctactagtactccacgttggagaatacctcaacgcatacctacagggatcgctctgcgatggtccggaatatctgtgcgcccgcgtatcgttttggttgggtgctgcggctttgttgtttgcaattgtcttgcaccatgaagaacatttgcggtcgagagtgccttcgacagttttgctatttttctggctctttacgtgaggattcggtgttcattgtagtggccgtggatgcagttgcggtagacttattactcttacagcgtcgtggcagggatcgtcaaattgagaaccttggtgttggttggagcatacgcacgagatcaggtcggatttgccctctatgtgagctttctgggattagcgatctttctgtttggattggagaacgtgcccaaaccggggacgtattatagcagtcttgatgaggacgtggtatgcctgtacatttcctgctcatgaggcgctttcaactattaacgtttttaaagtctgccagtccggaagaaaccgccaatatcttttcgcggttgacgttcttctggatggatcccctgatgaagcttg

SEQ ID NO: 4697 - DNA, 751 bp, Spizellomyces punctatus
  source 1..751: mol_type = other DNA
aagaagccatgcttgtgcatgtgtgctagtcccaacagaacttgaaatctgtaccaatatgattaacatgagctgcgaattctttcgaaatctcgcagatttccgattacccacatgaacatcttgacttcctgttcggtaaacaatttgccatcccgatttttcgtcagttggtacatatttccatccataaattcgaatacaaagtagagctcttcgttttctcgaaggacctctttcagttttacaatatttgggtgattgctcaatttcacgagggcctgggaatatcctttcatgttagcagggagtatccaaagcataaatctcttgccggttacccaccttgacttcacggagattcacagcgtcttcccagttgtggtacttttgtttcattttcttgatcgcaacctaagaaatgtctcgtgtgagaacaatctgctgatgtcgtccagatgcattggcccaccgttcccaatagtaaaggcagaaaccactaacccgctctccattctccctgtgctcagccataagcaccaccccaaaagacccatccccaatctgcttcgtaaccgtgtacttgttcatcttcacaattgtaaaattgcccaaaccaaagataagatcgtgactcaacccgatggaaggaacaaggtgtctacttgggcgagaatgtgaaaatcggttgcgattgcctgggacacatcacgcatgcaaacaatgtgttcgtgggaagatgggcatgtgc

SEQ ID NO: 4698 - DNA, 1487 bp, Spizellomyces punctatus
  source 1..1487: mol_type = other DNA
tgccttaatcgacgcgtgtgcaatttggtgaaagataaagtttctagaagcgatggtgaggttgtgtttgaaaatgcgaacgcttctcttcaaacgtgacgctatagcgcaaaggcccgcaatgggccaaaatggtggcaggtaaaaacagtgttttcggaggaatgctctacgatagtgcggctggcaaaaggcaacgtgacggtcggattcgaaccccgacccccatttttcattctccgatgaattttagatgttctttagtgtattagagtgacagaaaatggcactagctactacaccagggaataagccggcgacaaccggttcggaaaagccaagtaattccctccttacaaccaactaccactaggcccaattacacatgcaatacattacggattatgcgatatgattaaccggattatccggataataatgggtcttagtgccattttcaatcacctccacactatggtgttttcgataaacgctcgtatgagcatgatttggcaaggaccaaaaaaacatgatctgaacaaagatggggcatgcattatccatcttttacctacgcattcatgcccgtcgtgccaattgtgacctggtagtgatgcagcatgcatagcatacacgcgtgcggaaccagaaggatagctgccgcatgtcggccgacaaaataaagacaatgcaagcagccttccttttcgcctacagcaccgccaatgcctccagccctccagcgacaatcgcccttcgccttgaagaagccgcaagtcctcagatatgcttatgtaatacatcgcttagtttgatggcgcagcaactctgctcccgaaattcaaaatcctccaagtcaaagctgcgtccttggccaacactgaccgatcccatttcaccatgacggccatgacaccagaagaaaagtaaatatgagctctttcctccgttcatgaggagacagacaactcacattttttatacaatgtagatttgagctcattaaccgcaacctccaagaggtgcttggagcggaccagatcaaacagatcctcgcacagcgggatttgaatttgtactggggtacagcgcctacggggaagcctcacattggctactttgtgcctatgaccaagattgcggatttcttaaaggcgggatgtcatgtacgtctttttgaaaccaagtttctgttgaatgggaagaattggcaatagtctagtgactgatatgttcccataccgcatttaaaaggttacgattctctttgccaacctccacgcgtacctcgacaatatgaaggctccttgggatcaactagagctccgcacaaagtactatgaagcgaccatcaaggcaatgctcacttccatcggtgtcccattggataaactcaaattcgtcgtgggaacatcgtaccaattgagccaggaatactcactggatgtgtacaaaatgctcgcaatcacgaccgagcacgatgccaa

SEQ ID NO: 4699 - protein, 123 aa, Spizellomyces punctatus
KGRPCKIVDMSTSKTGKHGHAKVHLVAIDIFTGKKLEDISPSTHNMDVPNVSRTEFPLLDIDDGFLSLMHADGSTKDDVKLPEGELGEKMQAEFQDGKELIVTVVAAMGEEQALSYKEAPKGN

SEQ ID NO: 4700 - protein, 271 aa, Spizellomyces punctatus
MADHPFQIKPSIVSMRTRNPIRAIVDNLKVKPNPEKEFISLALGDPTTFGNFKLHESCLDAVKSQLESYKANGYPPSIGTEQARAAVAQAYTHPQAPLTSADVILASGCSDALNLCIGALANEGQNILLPAPGFSLYETLASSKGIECRFYDLQPHRSWEIDLNHLETLVDENTAAILVNNPSNPCGSVYSKQHLLDILAVAEKHRLPIISDEIYADMAFTGHEFLPISTLTTTVPILTTGGLAKKYLVPGWRVGWVLVHDRNGALEQIRK

SEQ ID NO: 4701 - DNA, 2487 bp, Spizellomyces punctatus
  source 1..2487: mol_type = other DNA
tcaagggtcgcccttgcaaaattgtggacatgtctacttccaagactggaaagcacggtcacgctaaggtccacttggtggccattgacgtaggtcccgccggtttactccttttggatgtagcttgtgttgatattctgcatcggatagatcttcactggcaagaagctcgaagacatctcaccctctactcacaacatggatgtgcctaacgtctctaggactgagtttcctctcctggacattgatgacggtttcctctctttgatgcacgctgatggaagtaccaaggatgacgtgaagcttcctgagggcgaactcggtgaaaagatgcaggccgagttccaagacgggaaggagctcattgttactgttgtcgctgctatgggcgaagagcaagccttgtcttacaaggaagcgcctaagggtgggtagtggtgcattctttggattgtaaattccctttgttaatctgctctcccaggcaactaaatcatgtagcgtaatcgattactccgtttccctgttccgcaaagtgtacagcctggccccttggataggtccccttgcctgggtttttgaaaaggcaccattttttttataaattttttctttctactgtattcttgctcttacctgatgcgacactttacatgcgaataccaaagcatgctgggaatcattcgtatccgtgattttttgatcgaaacggccctgctctccataccatctgtgtccagacagcagcctgtttattctgtttaaagaagttgaatggatgatacatttcggttgcacattatcaactttagtgtagaggtgacagaaactggcactagcaaggcgcgtaaccgagatagcctccataatcaacgaccggacaaatcgtttgggcccgcaagaaatcttggccttttcattgctatcgagctaccgtttcaagcggttttcattattattgtccgctgtgatgcattttgggggcaagactgaagcgaaagggctttccacagacaaatgcacgatcggcgtgttaacgtaatcaaccttgcccaatggcacagtcaagtgtgagccagaatacatgaacaccattacctcactgtagacttttccgaaatcagagtgaatagcaaacatggcagaccatcctttccaaatcaagccctcgattgtgagcatgcgcaccagaaatcctataagggccattggtgaggcaatatcgtgtccctagtcgcatcgcccgcttgacgcttttctaattttgtgatctcaaagttgataacctcaaagtgaagcccaaccccgaaaaggaattcatctctcttgctttgggtgatccaacgactttcggaaactttaagctgcacgaatcctgcttggatgctgtaaaatcgcaattagaaagttacaaagcgaatggatacccaccatcgatagggtatgtatgagcccgtcctttatcgagagtttggccagaggtgcatgtacatattgactggattgatccacgacattgtgctacgaagggatactggagggcggtgagcggatgtggccgtccctgggggaggttgggccgcgatagcgggtatgatgtggaggtacggtggaggtcgtatggaaatggcacgaatacaatcctggccccccccccccccggggaatcgcggaactgaatgcagctcgtctgacttgctgacatctgatttgggtagaactgaacaagctcgtgctgcggtggctcaagcttatactcacccccaggcgcctctgacatcggcagatgttatacttgctagtgggtatgtcgatcccatacttgcgtttccttgcgatggattctgctttcctgactcttcgtaaatagctgcagcgatgcccttaatctgtgcataggcgcgttggccaacgaagggcagaacattttgttacctgctccgggattttctttatatgagacactagcaagctccaaaggcattgaatgtcgcttctacgatctgcaagtaggtataatgatcaattacacgtccgagccgtctgttgacagttgtattataacatcagccacatcgttcctgggagattgatctgaatcacttggagaccttggttgatgaaaacactgctgccattttggtcaacaacccgagtaacccgtgcggttctgtctactcgaaacaacacttgctggatattcttgcggttgcagagaagcataggctacctatcatttctgatgaaatatacgcggacatggcattcacaggacacgaattccttcccatctcgacactgacaaccacagttccaatactgactactggcggtctcgcaaagaagtatctagtggtacgtagtaacggttctcttaacgaacgactttgagtgcatccgcttcaaccttctttacgtcagcctggctggcgggtgggctgggttttagttcatgaccgaaatggagcccttgaacaaattcgaaag

SEQ ID NO: 4702 - protein, 260 aa, Spizellomyces punctatus
MLATALRRRAILPVVPAPSGLGRPAACARRATLRFSSTTPAAPKPQAAASSLFQAAKEDAESTGAVSGTTSSEDATVPTPSKATDKAIPTFTTGDFRVSPRKLLHLARLIRGMPLLEAEVQMKMSKKRPADRVRAMLHRAASALQHNYGKDPKSYIVQQAWVGKGTYLKRLKIHGKARFGVMHRPAGHVKIILAEKKMDKTKQEKDFDKLVDMFKRHNLYIPLRDSEPVRFLHPPWSRKPWKYVTSPKWVDPKNALARDR

SEQ ID NO: 4703 - DNA, 1211 bp, Spizellomyces punctatus
  source 1..1211: mol_type = other DNA
tgggtcgaagaccatgcggacgagacatgcagagctaacgcagctaagcaatcaccatcgcaggtcctgcagaccaactgggcgcagaaactctatttctaccaacccatggaagaaaaagagcggatgggtccagtaacgcagcgcacagcgtctaccgacggacaggacataaaaccggttatcgtgcgtgcctaagggaccctacctctcccacaaaccaacgtcgcatgatttgggaaccacgaaaagtcactgtttcctatgtagatacgcgccaggtgtgtcggggcaggaagcgcgagctaggtcaaacagcagatgatggaggtcgttttggcaggaggaggttgggtgttcatggccagggcttcaagtgtgaggcaaaccaggttgcttgcatgattctaacccattataatgtatcaaaccgggtttgtagtcatggaaacagaacattcacaaggcactttagcactcaacactcgaaagaactggccggatcccagctgagatatcacaatgttggcaacagccctacgccggagggcaattttgccagttgttccagcgccgtctggcctcggaagaccagcagcttgcgctcgccgcgcaacattgcgattttccagtacaacacctgctgcacccaaaccccaagcagccgcctcctctctctttcaagccgccaaggaggatgctgaatcgacaggtgctgtaagcggaacgacgagctccgaggatgctacagtcccaacaccatcaaaggcaacagacaaggccattcccacattcacaaccggcgattttcgtgtatcgccacgcaaactcctccatctcgcccgtctcatacgcggaatgcccctcctcgaagccgaagtccaaatgaaaatgtccaaaaagcgcccggctgatcgagtccgtgccatgttacatcgagccgcatctgcactacaacacaattatggaaaagatccgaaaagttacattgtccagcaggcgtgggttgggaaaggcacctatttgaagagactgaaaattcacggcaaagcccgattcggtgtcatgcaccgtccagcaggccacgtgaaaattatcttggctgagaagaagatggacaaaaccaagcaggagaaggactttgacaaattggtggacatgttcaaaaggcataacctgtatattccgctgcgtgacagtgagcctgtacg

SEQ ID NO: 4704 - DNA, 555 bp, Spizellomyces punctatus
  source 1..555: mol_type = other DNA
taaagatgggaccatatgccttcccagtccctgagcagcaaaacgagtgtccatcatccccatggtatccccaagagttatcctcccatcctttaaatcaccgacatggattaagtcatgacgccgcacgtgagcttgagatcaacaatgcgtcctacatacctggtaagcgatttaacggaacgttttgtgcacagagtcctacaccgatatagctacagtcatggtgccatacacacttagtcaagctgcagagctatcaacaacaaacgtatacatacccatctcttcctttgctgataatcgtgacctcataatagaataaaccacactgtggtgggatgggatgattggttctcactgctgccgcatgtgcatcagtctgtccaggacctagtagtgaaatatttttaaaaaatgacatgttacaaagtagacatgaagtataccaaacaaccaacctgtatatgtaactctcaagctcgttgctgacaattccagtgatgggctcttgtctttgttactccactgggttggcagattaatggcttttga

SEQ ID NO: 4705 - DNA, 1790 bp, Spizellomyces punctatus
  source 1..1790: mol_type = other DNA
cttcttacatcccccgtggagtagaaagccatggaagtatgtgacgagtccaaagtgggtggatccaaagaatgcattggcgcgggatcggtagggctggggtggaagatgggagctacatacgtctatgtcggatcatacggctgtcatgatacacgtatttacaatctttttgaaaatattatttactctacaaggaagggaattggtctggtgtggacttgtgatgcctctttgctgcgatagcatgcattatagcatggcacgtcgtacgtgatacaggacagaaatagtgtttggaagcagttttgcgcatctcgtattagattccagtacgacccgaatagtgtagaggtgacagaaactggcactagctactacaccagtcaactccgcactatgtacaaacttttcttcaacagttcatcatagcagacactccttctcgacattgataaatgcagcagcaccatttcccgcccttaccaactcttgcactgccacgcacgtctgtcgatatatattttcaatggctggaacggcaggccgatgttgtgaaactagagcagctttagtagggtatacgagcggttactcgtcaagattgatcgcttaccaagtatggcactgttgacagcatcagccacaaggattcgattcgaaggatccaatagataggcaacaggactcgttgcgggttctgaatacgccactagggaataagtttcctagcaataaccaaaatatcagaaagagttttcttttcatcactgacgaggaggcaaagagaactaaccacaagtgcatttcggacttcttcgctttcgctggacccaaactccttttgcaagtcttgtccaaactgtactacatccctcattgagtcggctggcatatgtgacgaggctgcgctaccactggcagccgtatcatcagcatctacatccattgcgtttctgccgtcatccaaccgagcttcaggtgtccccgataaagctcgtatcatttcaacaaacttctgactgcgaagctggaagtcgagatgttggttttggggtagtattgatggatagaatgacttgatcaggttgatggcttcatccatatcgccattcaaaacctgagcacgaatcactggttatgacagacggcttaatatcgttgtcatatcacggtgtgctccaagaactcttactttgtcgttgacgaatatcatctttgctgaaaacatcgtcgtcaaccatcatccttttgttgctctccgatacgtgtccggatgtagaagaagaacttgatcgccccacgatcgcattcccatggaatgtagcagctgtttcgcaaaatccgtgatgtattagatatgcaaggatgagctcattgatgtcagttgacccgtcgcgtctttggccttttagccctgagtctgacgaatcttgtggaatgtcggtagtcggcagggagggaagcggtgcagcattcacggagtgccacaaccttgccttctcttcctgtaaagtagcatcacctatgtaagaattggatgcgtgtgcgtctcattattcgtccgaccttgtaatgatgttcaatatcgaacttgaattttcgttgtccaaagtttgcctccacaatttctcccggtgttcggagtcccactgatggatatagtgctccatcactctttccatgatcgacaacgttcttaaacgccactcctagccataccccgtttttggtgaacgagacagtcttgctcataaagttgataacacatccgatgatatcaccggttg

SEQ ID NO: 4706 - protein, 244 aa, Naegleria lovaniensis
MLPSSNQTSLTNNTSSSSASSGSESAAISYSSYETSPTNFNPLIARNIVNFLKIVSKLKHTLRTGWVDCKVQHPESIASHMYRMGIISMLTRNQPNIDTDKCIKMSLVHDLSEAIAGDITPHAGVSKEEKYRLEREAIERMRSTLLEGVNGTDKESEEYIQTVNEMLNLWQEYEDGTTPEAIIMKDIDRFDMVLQALEYETEQNLHLKTFYESTKGSFQTDMFKTLMKEVYAQKDKLEDQRRNK

SEQ ID NO: 4707 - DNA, 22 bp, Naegleria lovaniensis
  source 1..22: mol_type = other DNA
aaccactgaacccacagcaaca

SEQ ID NO: 4708 - DNA, 23 bp, Naegleria lovaniensis
  source 1..23: mol_type = other DNA
ccgttgaagccaaatgaacaatt

SEQ ID NO: 4709 - protein, 477 aa, Naegleria lovaniensis; identical to SEQ ID NO: 638

SEQ ID NO: 4710 - protein, 221 aa, Naegleria lovaniensis
MGGICSTMSTSTTLPVQKFRPIVICGPSGVGKGTLIQKLFAEYPTIFGFSVSHTTRAPRPGEQHGVHYYFTPKDVMQKEVDDGLFIEHANVHGNLYGTSFQAVREVQNQGKCCVLDIDIQGARQVRSNKELNPLVLFVKPPTMDILEQRLRGRGTETEESIQLRLKNARKELEQYEKDDTHLFDDSIVNNDLDEAYVNLKQTIHKHLPELDLVKNQDSATK

SEQ ID NO: 4711 - DNA, 5574 bp, Naegleria lovaniensis
  source 1..5574: mol_type = other DNA
aatttgtcccataaccggtgaaagatgtatcaatgatattcacacagtgagagattgtctcagtttgttgtacagttgtggaatgtatgattacagtggcacttgggctttcactgtgggactgccagcaaaatcaggagtgagtggatgtctcatgatcattgttcccaatgtgtgtggtatggccatctactcgcctcttgttgacaagaaaggtcactccgtacgagctgtggaaatttgtcaaatgatgtctcgaaaatataacttgtcaatatttggtggcttaatgagtggaaagttgtacaatcgaaagcacaatgtgttccaataatggcgttggccttaataaaattccattgatgtacagtgttaacattggttacaacgtgcaaataatttaaatatcattttcctaatgaaaaataattattaaatttacaatgatatcattaattacaagattccttgaatttgccctcaataattctacttgtttcttcgttgatcttcgagtttatctttttgggcatacacctctttcataagggttttgaacatgtctgtttgaaagctacccttggtactttcataaaatgttttaagatgtaaattctgctcagtctcatattccaaggcttgcagcaccatatcaaatcgatcaatatctttcataataattgcctccggtgtggtaccatcttcatattcttgccacaagttcaacatttcattcacagtttgaatatattcctcactctctttatctgtaccattgacaccttccaacaaagtacttctcatcctctcaatagcttctctctccaatcgatatttctcctcctttgaaactcctgcatgaggagtaatatcacctgcaatggcctccgacaaatcatgtacaagactcatcttgatgcatttatcagtatcaatattgggttgatttctagtgagcatggaaataattcccatccgatacatgtgtgaagcaatagattccggatgttgaactttgcaatcgacccatcccgtccgcaatgtgtgttttaatttactcacaattttcaaaaaattgacaatattacgagcaatgagtggattaaaattggtcggtgaggtttcataggatgaataactgatggcagctgattcggaaccagaggatgctgatgatgatgatgtattgttcgttaaagaggtttgattggatgaaggaagcatttttttgtgttgttttcagtttctgtttttgggataacaaagttattctgcaaacttttggaaaaccattaaaaacaccaaattcattgcctttctcttttcccctactcactctttcacgttgaattagttttttaaatgcactccaactctttcttggatgtaaaaagatgaacccacttcagatggttacaccagtgttgtggaatactgtcctttggagctcttgaatttggaatcttctggacgacatttcgtccaattaatatttgtcagtaattccgttgtttctctccttaatatcgttgttttgaaaaccgttgaagccaaaagaacaattacagcaatttctttcaaaaaccatcagtaaaacacagtcctgatgacgcaaggtttataaaaaaccttgtttgttttggaggttttgtttttataatcggttttaaattactcagcactaaaataaaagagcaaaagccacaatttattacaaactcaacaagtcaatataaccatcaacagtcagttcttgacgaaccatttattcattctttgaatcaaaagtgttgttttggaggtggataaggaattttatcaaggcgctcacttttccatgatcagttcggacgaaaagaatgaatcaagttattcaaattgatagagtttcaattcaatgagtcattcaatactgatagagtttcaactcttgttgaggttatcaaaaaaaaaaactcaacaacaaccttaatctcaacgaatgaagagaagtagagaggatgaacctactcatcctcctactaatccatctcttgcacacggcatcattccattcatgggcatgttcaagagattcctttcatgagtttaatcagtacaacaacaagggatgcactgacggatggttcaacttttctcaattcactgtgattgaatcccagccagtatttgatgttccactcaatgttcatcactctataacagagaatgtggcttttgataactctaaaaagccacctcagctcaagaaggcaaagaagggtcagaagactccccaaaaatttcaagcggacaaatcaatgaaaattcgtctctaccccaatgaacaagaaaggacaacattgaatcagtggatgggaactgctcgttggatctacaacaagtgtttagaattcaccaacaaatccaaaggtgtcaagaaaaataagaagaatttcagaacgtttgtggtgaacaacgataattatcagacagaaaatcagtgggttgtaaatactccttatgacgtaagagatgctgccgctattgaattgttaactgcgttcaacactaattttgaaaagaagaaggctggaacgattgacaagttcatgatccgtttcaggcgaaagaaagacagaaaagatcatttcgttctgcgttgcaagcactggaagaaaaagagtggaatgtattcttttataaggaacatcaagagcgccgaacctttgcctgaggagcttcagtatgattccatcattattaagaacaagttgaaccattattatttatgtattccacaagtactggatattaggggtgagaaccaagcccctcaacattcaggacaagttgtagcattggatccaggagtaagaacatttcagaccacctttgatttgaatggttattcaaccaaatggggctcaggaggtgccgaaagaattggtagattgtgttgcgcgtatgacaagttacaatcgaagtggtctcaaccagaagtcagacattgcaaaagatacaagtacaagagagcaggaagaagaattcaacaaaagattagaaatattgtggatgatttacacaagaaactgtgtttgtggctgtgtcgaaactaccaagtgatcttacttccttcgtttgagactcagaaaatggtaaagaaactccacaggagaattaatagcaagacagcaagaaaaatgttgacttggtcacattacagattcaagcaaagattgcttcacaaagctagagagcatccgtggacacacatttatattgtcaacgaagcgtatacatccaaaacttgctcatgttgtggacatgtttatacggttggatcatcggaagtgtttcgttgtccatcatgtggctcaatttttgacagagatatcaatggagccagaaatattcttcttcgattccttactactcatagaattagtttttgagcaccttgtgtgttgggtcttccccaccttgtgtgcgttgggtcctttcccctggctttcactctttgagtgtttgcttgcaagatcagcactttgttcgatttgtttgttttgttcaaattgttgatttaaataaaggcgacattcttcatctctcaaaccacacatcgaaattgatgcatgaacccaaagacaataaatttggcaataaaaaaaaattctgaaggcggttgcccgtgttgagtgtgccacatagaaaacacccgagcctcattctcatcatccgagagccaaattcctttttgaatttgaatcatcattgttgaatttttatacaagagtttcatctcaaaaacattgctgtccccgagattttaaaaagatcatcatcatcagaaaattcatatgggaggaatttgctcaaccatgtccaccagtacaacattaccagtccagaaatttagacctattgtcatttgtggtcctagcggagttggaaaaggaacactcatccagaaattgtttgccgaatatccaaccatttttgggttttcagtctcgcacacaacccgagcaccaagaccaggagaacaacacggtgttcattattactttacaccaaaagatgttatgcaaaaggaggttgatgatggtcttttcattgaacacgccaatgttcatggcaatttgtacggaacaagttttcaagcagtgagagaagtgcaaaatcaaggaaagtgttgtgttttggatattgatatccaaggagcaagacaagtgagatcaaacaaggaattaaatccccttgttctctttgttaaaccaccaaccatggatattttggaacaacgattgagaggaagaggcacagaaacagaagaaagcattcaattaagattaaagaatgcccgaaaggaattggaacaatacgagaaggacgacacccacctctttgatgactctattgtgaacaatgatttggatgaagcatatgtcaacttgaaacagaccattcacaaacatcttccagagctcgatttagttaagaatcaagactccgctaccaaataatattggaggtgatgcctttcttgtggcatacatgatacaaacaaaacaataaaaaataaaaaattgaatatataagtaggtggttgggttgagattaacggactgaatgctaaaacattaagggtatacagaaattgaatacctcaagagagagagtcataccaacaagtggcagtaccaattttcatgtttctttgctgccttacttcttactgaatgccttcttaatacatttacccaacaatttagcccttctgtatttcctcaacaaactgaacggtggtggattgattactgaatttacatccacatattttcgttgtgacctgattccctgattcaaaaagatcattcttgcagcactggtaacaacagcacctcccaatgtaacttcactggcaagttgtggccacgatgtaatactctttccaatctctaaatatgactcgagagctttgtctgaggctttggaaggttctaaaaattgagccatgagtttcactttttgttctggagtcaaatcattcgataaagccgataataactcttgactaatctttccatgcaagatgggataatttggatctgtgtcgtatcgttcaacatctaaacaacctcgatcgctgcactccatgactattggaattttcaactttttacattcctttcgaagtaagagtttaatgtcaaaactgtcacattcgtccacaacaagattcagttggtcatgaccacttccaataaattcatgaatattttccatggtaattccttctggataaatcactactttcatgaagggatccatctctacaattgctctttttgcaatgataacctttgataacgttgacatgaatttccttttcagtactgaaacaaatataattccttacctttggaacaccaatttcagtcaatgaacttctcactcgattcatattcgttaattccaaacgatcaaaatcagccaatctcacctctccacatactctctccatggccagtgttgttgccactgcatttccaacagaaagtccaaccactcctattttcttctctctcaatg

SEQ ID NO: 4712 - protein, 495 aa, Naegleria lovaniensis; identical to SEQ ID NO: 644

SEQ ID NO: 4713 - protein, 330 aa, Naegleria lovaniensis
MFLKRRQQPASVQPQESYLSDEDEKEDDVIIEQTENTSGEEEEDFESEMYGEDDPLTDENDQESSNSEDHNNHANLSSEDEEDEKTLSFAERLALSKLKANNNSKQQNNIHSTRKSSNFLNSSEDEQQFKRRKRKEKITKDPPIIEKKNKNAPKEVSAKIKPSTIPDIASRLGFVKKKSHDPRFDPKASSNIDHEGFKQFSRNYAHVFEKLKDDIEELKEQLRDKTLSQQEKLEIQREISKLQTRNKKIESQKAASEVRDQFYQREKKLIAEKGKKAFFLKDSDVKKILKQRKMDTLKKSGKMNKYLKKTKRKDKSKVSSLMPTTRASHE

SEQ ID NO: 4714 - protein, 123 aa, Naegleria lovaniensis
MQSLKFALCALLVLCLTVSFTKAQFSNMYNGAYGYQGGAGNNYGVAGGNYNSYGQNTNAYSNQVASTNYQPYAAYGSAYRGPTAYSSNYGSAYSMPFFGGWGGFGMPFYGFGYGGLWGRGFWC

SEQ ID NO: 4715 - DNA, 5494 bp, Naegleria lovaniensis
  source 1..5494: mol_type = other DNA
tggtgaatgcatttccccaagcaccagatgtcatgcctgcataaataaatcgtaccaaatctcgatcccaatgtcttcgtccagatttcacatattcttgtgtgagaatgtattctccacgcgagggtctgtaatgatttttgggagtgaaatgcggacgcttgaccttactcatgggtggttgaccttctaatcgaatcattcgatatctgtaaacaagagctccaaaatggccacttttcagtctctgaggttctctccaataatcagtcacccaatacaatccatcgtatcgataaccttttgctggagcgtaggcagaatctaattgatagccacgaacaagtcgaacaggaatttttcttttcaaactctccactaaactaatgttatatttgttgagagtttgatcctcataatctgttcctccttgtcctgtataaatgaaaacatctccataatcttcgtcaccgtaaccacccatggccattgctacaatcgagtccgctggcactccaaaatggccactaatacctggctgtgttggagtgtgagaacctctcttggagcattctattcttgattcgtacgctttgaaaacatcgtctctgtgtccataaactcgagagccaatcttaataggtggtttcaataaggaatctttttttccatctctgcgacgaatggtgttgacccactcctcagcattacccatatgttttctgtctttttctgtaacggtgggacttctttttagtttcatgtctctttctatttggtcatctgttctgtgtctaatttgatcatcgtgttgttggcatttatgattcttgagatagtatgcgttcagagttatcattccactttcagtgtctacaataaaatcagaatggccactctcaatactttcacgagtaattgtcacatatttcttatctgataatttcatggtcatggtactatttgagctatttgcataatcctcgtcgagtggtattgataacagttcattctcatcatcggtatcgagcgtttcctcttgaaaatcaacaagaaatctattaccacttgcatttgttccaaaatgaagttgtgaagatgaaggttgactttgcgtgagtttatcatcgtttgacctttcggaaatcgctggtttcataaataacggttgagaaacttgatcaatcacagaactagtggtattatcatgcttattcaaaaattcatttaaattcttttgtttggaatttgatgatgatttcttactcgtttttgttccgttgtttgttgaaacatgttgattgccgcaagctccattttgactagtccttcttttttcttttttactagtattttgtttgttattgttgttattattgattttatagtgttgattccgagagttgttgcgagtcaagacatcatcactgctgcttgaatcatccgacaaggcaattttgcgtttttgcattttttccccgcgcaaaaccgttgaagccaaaagaacaattccagcaaattctttcaaaaaccatcactaaaacacagtcctaatgacgcggctttattactaaccttgtttgttttggaggttttaattgctctgctcaaaaataaaagaacatacaaactcagcaagtcaatacaatcatcaacagtcagttcctgacgaaccatttattcattctttgaatcaaaagtgttgttttggaggtggataaggaattgtcaaggcgttcacttttccatgatcagttccgacgaaaagaatgaatcaagttattcaaattgatagagtttcaattcaatgagtcatgcaatactgataaagtttcaactcttgttgaggttttcaaaaaaaaactcaacaacaaccttaatctcaaacaatgaagagaagtagagaggatgagcccactcatcctcctactaatccatctcttgcacacggcatcattccattctgggatgagtactcacaacaagtatcggataaactttgggcatgttcaagagattcctttcatgagtttaatcagtacaacaacaagggatgcacagacggatggttcaacttttctcaattcactgtgattgaatccaagccagtgtttgatgttccactcaatgtccatcactctataacagagaatgtggcttttgataactctaaaaagccacctcagctcaagaaagcaaaaaagaatcaaaaggtggcccaaaaatttcaagcagacaaatccttgaaaatccgactctaccccaatgaacaagaaaggacaacattgaatcagtggatgggaactgctcgttggatctataacaagtgtttagaattcactaacaaatccaaaggtgtcaagaaaaataagaagaatttcagaacgtttgtggtgaacaacgataattatcagacagaaaatcagtgggttgtgaatactccttatgacgtaagagatgctgccgctattgaattgttgactgcgttcaacactaattttgaaaagaagaaggctggaacgattgacaagttcatgatccgttttaggcgaaagaaagacagaaaagatcatttcgttctacattgcaagcactggaagaaaaagagtggactgtattcttttataaggaacatcaagagttccgaacctttgcctgaggagcttcagtacgattccatcattattaagaacaagttgaaccattattatttatgtattccacaagtactggatattaggggtgagaaccaagcccctcaacattcaggacaagttgtagcattggatccaggagtaagaacatttcagaccacctttgatttgaatggttattcaaccaaatggggctcaggaggtgccgaaagaattggtagattgtgttgcgcgtatgacaagttacaatcgaagtggtctcaaccagaagtcagacattgcaaaagatacaagtacaagagagcaggaagaagaattcaacaaaagattagaaatattgtggatgatttacacaagaaactgtgtttgtggttgtgtcgaaactaccaagtgattttacttccttcgtttgagactcagaaaatggtaaagaaactccacaggagaattaatagcaagacagcaagaaaaatgttgacttggtcacattacagattcaagcaaagattgcttcacaaagctagagagcatccgtggacacacatttatattgtcaacgaagcgtatacatccaaaacttgctcatgttgtggacatatttatacggttggatcatccgaagtgtttcgttgtccatcatgtggctcaatttttgacagagatatcaatgcagcaagaaatattcttcttcgattccttactactcatagaattagtttttgagcaccttgtgtgcgttgggtcctttcccctggctttcactctttgagtgtttgcttgcaagatcagcactttgttcgatttgtttgttttgttcaaattgttgatttaaataaaggcgttaacaattaaatatttaacatgaatacctagatctggatcatgaatactcttgtttataattttattcatgtgaagcacgtgtcgttggcatgagagaggaaactttgctcttgtcctttcttttggtctttttgagatacttgttcatcttgcctgactttttgagagtatccatttttcgttgcttgagaatctttttcacatccgagtcttttaagaagaaggctttctttcccttctctgctattaatttcttttctcgttgatagaattggtctctcacttctgaagctgctttttgtgattcaatctttttgttacgagtttgtaatttggaaatttctctttgaatttcgagtttttcttgttgtgacagagtcttgtctctcagctgctcctttaattcttcaatgtcgtcttttaatttctcaaaaacatgtgcatagtttcttgaaaattgtttaaatccttcatggtcaatattactagatgctttagggtcaaatctaggatcatgactcttctttttcacaaatcccaatcgagaagcaatgtctggtatagtacttggtttgatttttgcactcacttcttttggagcattcttattctttttctcaatgattggaggatcttttgtgattttttcttttcgttttcttctcttaaattgttgttcatcttccgaagagttcaaaaaatttgatgattttcttgtactatgaatattattctgttgtttgctgttattattagctttcaatttacttagagccaatctttcggcaaaagataatgttttttcatcctcttcatcttccgaagacaaattggcatgattattatggtcttccgagttgctgctctcttgatcattctcatccgtcaatggatcatcttctccgtacatttccgattcaaaatcctcttcttcctctccactagtattttcggtttgttcaataataacatcatcttccttctcgtcttcgtcggaaaggtatgattcttgtggttgaacggaagctggttgttgtcttcgtttcaaaaacattttttttgaagtgaattcactaactcattgaaaacaaagaattgcaacgagagtattgaactgcagtgcttggtacaattacaatcaaagaatatttttcacaatattggttttttattgcaagagctcaaaacgtcacaacaatttcacaattgtgttgttgtcatgggtacaaactcaataccaaatctagaagagtgtttacgaatgccacacttgcgcatgttctcacctcattcaatctcattcacttaacaccagaatccacgtccccataatccaccatatccaaatccatagaatggcattccgaatccaccccatcctccaaagaaaggcattgaataagcactaccataattactactgtaagcggttggacctctataggcagatccataggcagcataaggttgataatttgtggaagcgacttgattactataggcattggtgttttgtccataactgttgtaattaccacctgctacaccgtaattgttaccagcaccaccttgataaccataagcaccattatacatgttactgaattgagcctttgtgaaagaaactgtgaggcacaagaccaataaggcgcagagagcgaatttcaatgattgcatgttgtgagttgttataatatgttcacaattttgatttttgttttggttgttggatttggatgtcacgaggtgttcttggattttatagttttttcaaatggtaggatgaatttggaaattcactgttttttaacacaagtgtacactcgatgttgttcaatcaagtgaatataaaagtaaatatgataaagataacaagtgaatggatggtgagtgagaataatcatgatcagctcccaaaattgataaataccagtttaggagagaggcgccttcacaaccaatctaccaaacactgtaaattgatgttgtgtgaaaaa

SEQ ID NO: 4716 - DNA, 5517 bp, Naegleria lovaniensis
  source 1..5517: mol_type = other DNA
acaggttcgaaagtgcaaactttacttcttgtggtttatgaaacagttcgtgaggatattaatattaagcgagttggtgcattttgtaagagattattacaaagttgtttcacatgctacaaccctggatacacagcagctgtgcttatggtcattgaccaaattctaaaggtcaagcctggtatttatctcagcatgcttcaacaaaagaactttttaactaaagattccaatgcaaagtcaagaaatgagtctgccgaagaagatgatgaggaagaagcattccaagacattgacgatgaagatacaatgaagcaagaagaggaaaaacctaaagaaacaatcgttctttccaaagataattctgtgaaaattgttgacaatgaaattgtgattgaagggttcacaaataacaacaagaaatctacaaccacttcatccacaacttcttcgaaagataagcaagacgaaaagaaaaagactataccatcacagaaagctagaggcactaatcctttcaccgaattttcagaatacgatccaaccacaccaaaacctgaagcagctaatgctctctcttcaggattgtgggaactagatcttatcaagcatcatttccatcctagcgtgtgtgaatttgtggacagtttagtttctcgttctggccaacctttgtacaaaggcaatccgattattgatttttcaacaacagcattcattgacaagttaatgttcaagccattctcaaagaaagccatgaaagaaaagggttctggcctcttctcgaaatctaaatcagcattggcagctgaaaaattgatccgaggtacctctaccatcaattctaaggaattcgcagagttgccagaggagttagttaagagtgacgagcgattcttccacaaatttatggttgaaaaattcaaacgaaaagacgaagttgaaaaagaaagagaatcacgagaggaaagaagaaaagaagccaaagcaagagaagaagaatttcttaatgcgatggatgaagatttcggctcagacaacgacccattcgatgaattggatgacgatgcagtgatggaccttttggaacaagctgaagaaaacgcagaagaagacgaaatcgttccagcaggatcaaagggtgacagtggttatggttttgatgtcacaagcgtctcggaaaaaccatctcaagatgaagttgcagagttattagaagaggatgaggatgaattattagaacaagaaaaacaagagcttaaagaagagaaaaacccttcctcaaagaaacgaaaacaaaaaccagttgcaaccaagtcaggacatcatcaaccacaaagtaagaaagtcaagcgaaagaaataaaaccacctacggagtgctaaattctaactaggagttcatgttcaaaataatgaagcacaactatctcacatgatcattcctttgttcaccgttgaagccaaatgaacaattacagcaatttctttcaaaaaccatcactaaaacacagtcctgaggacgcaaggtttattaataaccttgtttgttttggaggttttgtttttattaacggttttaagttgctcagcactaaaataaaagagcaaaagccacaatttattacaaattcaacaagtcaatataatcatcaacagtcagttcctgacgaaccattcattcattctttgaatcaaaagtgttgttttggaggtggataaggaattgtcaaggcgttcacttttccatgatcagtttggacgaaaagaatgaatcaagttattcaaattgatagagtttcaattcaatgagtccttcaatactgatagagtttcaactcttgttgaggttatcaaaaaaaaactcaacaacaaccttaacctcaaacaatgaagagaagtagagaggatgaacctactcatcctcctactaatccatctcttgcacacggcatcattccattctgggatgagtactcataacaagtatcggataaactttgggcatgttcaagagattcctttcatgagtttaatcaatacaacaacaagggatgcactgacggatggttcaacttttctcaattcactgtgattgaatcccagccagtgtttgatgttccactcaatgttcatcactctataacagagaatgtggcttttgataactctaaaaagccacctcagctcaagaaagcaaaaaagaatcaaaaggtggcccaaaaatttcaagcagacaaatccttgaaaattcgtctctaccccaatgaacaagaaaggacaacattgaatcagtggatgggaactgctcgttggatctacaacaagtgtttagaattcaccaacaaatccaaaggtgtcaagaaaaataagaagaatttcagaacgtttgtggtgaacaacgataattatcagacagaaaatcagtgggttgtaaatactccttatgacgtaagagatgctgccgctattgaattgttgactgcgttcaacactaattttgaaaagaagaaggctggaacgattgacaagttcatgatccatttcaggcgaaaaaaagatagaaaagatcatttcattctccattgcaagcactggaaatcaaagaaaggacaatattcatttattaggaacatcaagagcgccgaacctttgcctgaggagcttcagtacgattccatcattattaagaacaagttgaaccattattatttatgtattccacaagtactggatattaggggtgagaatcaagcccctcaacattcaggacaagttgtagcattggatccaggagtaagaacatttcagaccacctttgatttgaatggttattcaaccaaatggggctcaggaggtgcctaaagaattggtagattgtgttgcgcgtatgacaagttacaatcgaagtgatctcaaccagaagtcagacattgcaaaagatacaagtacaagagagcaggaagaagaattcaacaaaagattagaaatatcgtggatgatttacacaagaaactgtgtttgtggttgtgtcgaaactaccaagtgatcttacttccttcgtttgagactcagaaaatggtaaagaaactccataggagaattaatagcaagacagcaagaaaaatgttgacttggtcacattacagattcaagcaaagattgcttcacaaagctagagagcatccgtggacacacatttatattgtcaacgaagcgtacacatccaaaacttgctcatgttgtggacatgtttatacggttggatcatctgaagtgtttcgttgtccatcatgtggctcaatttttgacagagatatcaatggagccagaaatattcttcttcgattccttactactcatagaattagtttttgagcaccttgtgtgttgggtcttccccaccttgtgtgcgttgggtcctttcccctggctttcactctttgagtgtttgcttgcaagatcagcactttgttcgatttgtttgttttgttcaaattgttgatttaaataaaggcgtaaaatcgaacaaaacaaaatgagtcaaccacctcgtcctagcaatatcagccacacacttcctcccgagattatttgcgaggtgatggtgtatgctctggatcctcatgctctcatcagcagtatcagcagaatgcggcatgtcagtcgttcttggttcggagtaacagagagtcgagtgttttggcaacttgtggtcgaggcttgccgacctccccgacctaataaacgagattgctcttccaatgaatgtaagatcatcaccacggtgaaggaggatgatgcgttgggtgaggttgaacaagagaatgttcttgaacaagatgaaatggaagaggctcttgatgatgatgatgccatacttgtagatatttacaacgaagaagaggatatccttgatgagaatgatgataatcgttgggaagatttagaggaagctcttcctggtaccagttcactgttggaaacattatccgagagttattccaatccaactgattccgaagaagattgcaattcctacaacagttttcatggacactttttcaagactcatgaattcatcgatacattgttacatcaaactcaattcaacaagttttactttttgaacgatcagcaccaacagcatccacaacaaatggatggatttttaggattccgaatgttccttgatgacaaatcttatatggatccaacacctcatgatgatgatccttccttgttcttgcccaaagcagatccagccaacaaccatcacgaaactgtgtgctctctgtttcatgaaaaagtggtgtcttggattgatgcatttggcatgcatgaccatggagagaatgtattgttgaaggccttgttggaaatttcactgggacatgaaaccattgagtatttgggaatgaggaatatgggaacttgtgttcaggcgttttttcacaaactcttcgaacctgccatgttgttggtaagagaatggtttcaaatctctcctaacaacagcaagccaaaagaaattaatcctttcacggccattcgtgacacaccgcacacaagtacacaagagctctttttcaacaagaatttacttcaatttttaaaagataataattcgcatcagaaagaacaatccatatttaagcaagacattggaggtgcatggaatgatcacgattctttttatcatgtcattccaaggcaatatctgttattcatgattgaacattttacgaatatgaatgttgtggtaaatcgagaaggtgacacacaagatgttgtgacatttgtcatggaacaattatatcagtgtggacttcatgttgagaatgtgatttttcatgacttgtctcttcatttgagaaatttcgagagaacagaagcacttcgacgaattattcctccaatgtcaagtggtttttacttgcaacatttggcagtttggactcaaaatctttcattgcttcattggtgcctgactgtgaacaataaggattgtcatgcaaaaattgtggacgtattgacaccaaaagcgtcattttctgacatgattccaaggtctttgacattccagtcttaccttagaacatgtttacaggattcgtgtggactcacaattcttcattacgctgttgcaatgagaagtttagaatttgttagagtattattgaaccattatttctgccatccattcatcatgtctaatttcaaagaatcacccctttctttggcttacaaaatcagtactcatcacgttggaaaaaccaaaaacaatgttgagcaagcaatgttagatcttttcacacaacgttatcaattacctgaaacttgcttaacagagactgaaacaaatgttacttcatgtcctaaactcaacgacgatgaaaagttaatcacacaacgacaggaagttgattcatggtacaatatcagtacaggagaatggcaagaacgtgaagacgatttagaactcaatgtcaacaaagtcgtagaaaaacacggtgaa

SEQ ID NO: 4717 - protein, 495 aa, Naegleria lovaniensis; identical to SEQ ID NO: 640

SEQ ID NO: 4718 - protein, 173 aa, Naegleria lovaniensis
MKSQQRIRFVKVFPNAYTEAEKDQKLVHLKSTNQPSGTAVTEKETKDHVHSGVSGNSQTSKAGTLRRRRRSKPLFHDESNQQQLQESTTLLPNIPPNKSFISNKPVRNYKTSSSHHNKKRNVPKTNHEQDHTDANDHPTTDPTISNLKNTNTTTHDLLNHHLKNSETSNNAFI

SEQ ID NO: 4719 - DNA, 5517 bp, Naegleria lovaniensis
  source 1..5517: mol_type = other DNA
atggtcttagtgaagaacaatttcgagagtgcagaaaatgtctcgtccagaccattttagctaccgatatgagcaatcacttttctataatttcaattttcgaatctcgaataggaactggaagattatctaacgaaaatgccgaagatagaattctattaatgcgagtgttaatgaaatgttcagacattagcaatttgagcaggccgttccctattgcaaagaaatgggccaatgcatgtattaatgaattcttctcacagggcgatttagagagacagaaaggacttccaattagccctctcatggatcgtaatactttggatttcccaaagtcacagatggattttggaaaatttgttgttgcgcccttgttcaaattgctttgtgcagccttcaaagaattgaccttcttacacgaatcggtgttgaataatatcgagacatggcgacacatttacgaagaggaacaagccaaaaaggcactcgctgcagcaaactcaaccactccatcgtctacagcagcaatagttccacctcaagaaagttctactgaaaaaccagaagaatcaagcaaagagccaactaaagtggaccaaacaagtgttgctcatgccgaagataatgctaaggcaagcacatcaacgacgacagaacaaaaccctcctacgagaaatgatactgtcaccactgctaagcctgctcaacctgccaatcagtccaacaatatgttgttcattttgttgccagtcttgtttttaattctctcactcatgctatatttcctaaccatgtaaatttaattaaactgcttgaatcttcttaactttggatacgaacattaatttatttgttgatctcatgtgagatgtcgaaaagatttaagccattattattacaaacgccttggcaaatccacaccaaccccagagaaatgagaggcaatggaagatacagaagagattgtagttccagtactttcgtgactcttgctccaaactcgtggaactaagctcgttactctaaatttgcactgttttcgtttttcaaaactaaggaaataacatgcttcacatgaatggccatgatgactcctacgtggacctcgtttctctgagggaccaattctaaatggataataaagcctcttttctgaatcgccacgttcctcacactccagacaatgttgtccaacatctgaacggacatttatggatgaccaaacgtgctgacaacgctcacacttgtaatatccttttccaatcgcttcttcattgggaatggcttccaatttcttatgacaatcattgcatctgcaaactttcttataatcaaacacagtcttccagaaccatgaggaacaaggcttacacgcaaaaaaggcataaactttttgtttttcagcatgcttatccaattgctcacgagtgagtgaaggaacgtttgatgagccgttgaagccaaatgaacaattacagcaatttctttcaaaaaccatcactaaaacacagtcctgaggacgcaaggtttattaataaccttgtttgttttggaggttttgtttttattaacggttttaagttgctcagcactaaaataaaagagcaaaagccacaatttattacaaattcaacaagtaaatataatcatcaacagtcagttcctgacgaaccattcattcattctttgaatcaaaagtgttgttttggaggtggataaggaattgtcaaggcgttcacttttccatgatcagttcggacgaaaagaatgaatcaagttattcaaattgatagagtttcaattcaatgagtccttcaatactgatagagtttcaactcttgttgaggttatcaaaaaaaaaactcaacaacaaccttaatctcaacgaatgaagagaagtagagaggatgaacctactcatcctcctactaatccatctcttgcacacggcatcattccattctggaatgagtactcacaacaagtatcggataaactttgggcatgttcaagagattcctttcatgagtttaatcagtacaacaacaagggatgcacagacggatggttcaacttttctcaattcactgtgattgaatccaagccagtgtttgatgttccactcaatgtccatcactctataacagagaatgtggcttttgataactctaaaaagccacctcagctcaagaaagcaaaaaagaatcaaaagacgccccaaaaattgcaagcagacaaatcattgaaaatccgactctaccccaatgaacaagaaaggacaacattgaatcagtggatgggaactgctcgttggatctacaacaagtgcttagaatttacacacaatttcaaagatgtcaagaaaaataagaagaatttcagaacgtttgtggtgaataacgataattatcagacagaaaatcagtgggttgtgaatactccttatgacgtaagagacgctgccgctattgaattgttgactgcgttcaacactaattttgaaaagaagaaggctggaatgattgacaagttcatgatccgtttcaggcgaaagaaagacagaaaagatcattttgttctacattgcaagcactggaagaaaaagagtggactgtattcttttataaggaatatcaagagtgccgaacctttgcctgaggagcttcagtatgattccatcattattaagaacaagctgaaccattattatttatgtattccacaagtactggatattaggggtgagaaccaagcccctcaacattcaggacaagttgtagcattggatccaggagttagaacatttcagaccacctttgatttgaacggttattcaaccaaatggggctcaggaggtgccgaaagaattggtagattgtgttgcgcgtatgacaagttacaatcgaagtggtctcaaccagaagtcagacattgcaaaagatacaagtacaagagagcaggaagaagaattcaacaaaagattagaaatattgtggatgatttacacaagaaactgtgtttgtggttgtgtcgaaactaccaagtgatcttacttccttcgtttgagactcagaaaatggtaaagaaactccataggagaattaatagcaagacagcaagaaaaatgttgacttggtcacattacagattcaagcaaagattgcttcacaaagctagagagcatccgtggacacacatttatattgtcaacgaagcgtacacatccaaaacttgctcatgttgtggacatgtttatacggttggatcatctgaagtgtttcgttgtccatcatgtggctcaatttttgacagagatatcaatggagccagaaatattcttcttcgattccttactactcatggaattagtttttgagcaccttgtgtgttgggtcttccccaccttgtgtgcgttgggtcctttcccctggctttcactctttgagtgtttgcttgcaagatcagcactttgttcgatttgtttgttttgttcaaattgttgatttaaataaaggcgttgttgcttgtttcagaatttttcaagtgatgattcaacaaatcatgagttgttgtattcgtgtttttcaaattagaaattgtaggatcggttgttggatggtcgttagcgtctgtatgatcttgttcgtgattggttttgggtacatttctcttcttgttatgatgggaagaagaagtcttgtaattccgaactggtttgttggaaatgaatgacttgtttggaggaatattcggaagtaaagttgtgctctcttgaagctgttgttgattggattcatcatgaaacaaaggctttgatcttcttcttcgtctcaacgttccggctttggatgtttgactattaccagaaactcctgaatgcacatgatcctttgtttctttttcagttaccgcggtacctgatggctgatttgtagacttcaagtggaccagtttttgatctttttctgcttccgtataggcattgggaaaaactttgacaaaacgaattctttgttgtgatttcattttttttaaaattccccacccaccaattttagatgtcattcgaaaaacacttctcataaaacgtcatgcttaaaacaatatgtcatgatccatgagctcaacaacaagagaatggcgtatcattgaaagatggccgagttgaatcgctctaacatgaaagtctcgtctggtaaccacaacattttcacatcttcacctaaacctccaaaaaggtcattaaatttcgtaggattcatttggcattgtttgaaaataaagagcaatagtaaccctccttccttagaatttttcaataatttcaacactcgaacatgagtttccattgctcgaatgtatttggtaatggtattcacgcaataacaagcaatatcagttgtcacaccattcgattttgattgtttccatatcatgtctttgttttgaagaagttgtggactcaaataccgatattcaacttgtgccttggaaaggagaggattactctgtgggagtacttgagaaaattcttgttgagatttttcagattcgaagagaaacaatattcgtgtagcgtctgccttaacagttatctcttgtttctcatgaacattcctcaaatcaaagggacaataaaaatcatttcgaatgttcattttcaaacaatcaatcaaatcataatttggaattccagttgcttgatcacacaatacagtggaacatacttctcgaggaaaataatctgacagtccaaaacggtcgaaaccactacacaattgttcaataaaagattttcctttcgacagaagtgagacaacacgagcacgtgtcacttgcattgctacttgtttcaaatcatgtttgtcacaataagcatagaaaaattgtacatgttcactgtcgaaatgatggtcaaaagcgagagtttccaggcttgtcacaggaatggtatagccagcgtttaacaggcgataccaccaatgggaatcttttttaaccaaagctttttgaaggagagaatttgagttggaaaggagcttgtgatgaatgtgatgagcttgttttcgcatggggtgaggtttgtctttgagagcactcaaactaatatttgtcctcatttcatacatgtaacaaggttgatggggcgaattgcttgatttttttgtagttttgaatggtttcacaccaaacaagcaaacaaattccatcatggagaggaacaatcctcttcccaatacattcacatacggtttgaattggttacaaaaccagtcagacccttctatggaaatatctgtctctgaaatacccaaactatccgtataatgttcataatacaaataacattgtttgtgttgtttggcatttgcaaattttgaatcaatatttaacaaatcaccgttgctatccacaaatgcaaagtgaatgacatcactgccatgagtgaatgtaaaaaaactcactctctttccagatccattatccatcgtaattaacttggagcgtttgatggtc

SEQ ID NO: 4720 - protein, 359 aa, Naegleria lovaniensis
MGTARWIYNKCLEFTNKSKGVKKNKKNFRTFVVNNDNYQTENQWVVNTPYDVRDAAAIELLTAFNTNFEKKKAGTIDKFMIRFRRKKDRKDHFVLHCKHWKKKSGMYSFIRNIKSAEPLPEELQYDSIIIKNKLNHYYLCIPQVLDIRGENQAPQHSGQVVALDPGVRTFQTTFDLNGYSTKWGSGGAERIGRLCCAYDKLQSKWSQPEVRHCKRYKYKRAGRRIQQKIRNIVDDLHKKLCLWLCRNYQVILLPSFETQKMVKKLHKRINSKTARKMLTWSHYRFKQRLLHKAREHPWTHIYIVNEAYTSKTCSCCGHVYTVGSSEVFRCPSCGSIFDRDINGARNILLRFLTTHRISF

SEQ ID NO: 4721 - protein, 464 aa, Naegleria lovaniensis
MQTSSPPSAVANTTSSSAAAGGITNSEGTASDFHDELARDIREHLLQQQQTKVEIKRQVSDMEAEKERKNWLIHVLYTRQDIDECLQVIEEQIKSSEGRCEFALYVKGLIKRQQGDITQSLQLFQQACILNPMNPQNIKQVGKSLYLLGKFKEAIEIYDEAKKISPQDWEIYHNKGLCHANLGEFEKAEDCYQRANSIHRHDITFIELGKIFTIQERYEEAIDIYLEALDFSPENPELLSTVGLLYLRVGDNLKAFDYLGNSLSHDPSNPKTILATGSIIQDHGEMDVALSKYRIAAKKNPNSAQLWNNIGMCFFGKLDYVTSIACLKRALYLAPFEWIISYNLGLVHLNTKQYASAFHYFSTSINLNPNFASTYMYLGITLNRLEDFENACSAYEKAIEMESDYLFELNYAITLFNHQHLEQARVHFLEFERLFQEAHSGEDAEECDDEYILEARKKLSSLLS

SEQ ID NO: 4722 - DNA, 5511 bp, Naegleria lovaniensis
  source 1..5511: mol_type = other DNA
tagaatcatggaatgaaagtgagtaccaatcatgtcgcctatgtgaaagtgccaccaacaatcgaaaaacgaaatttctaataaatttcacattcaataagccagtagaccaaagctggaacaaggttcgttccaattcttgattgaaaaaggtatcaagtccttgaggaacaactgagtctttcaccaataggtctacttcttcgccgaaatggttcaaaaatgcagcttcaatatatttcaaggtaaatttgctaaaagtcgtaacttgtttacagatggtatgacttctttctgcttgaaagcaactgtccgtcaaaacgtaaccaaattttgtgtgaaaaagtgctggatctaatctaattggtccctcttttacaatcgaattttgcactgttttgacaagaaatagcttttcaatcattttctttgttttaaacatgtcaccttctagatgcaacaccatatcaaaattaaactcgtcataggaataattgaaaattctctgtgaccacagtaatgacttgactatgatattgttgtgctcaactctatgttgaccgaaccattggtcatgattcaagttaacccaataatttcgtttgccattcaaaaacttgggaataaattccaagacataatccttcttgacaggtggtgttatatgtggcaatgattgataaaacttgaaggaaagaaattgacttgcaagatcttcctcatcatgttgattcatatcttgcatgtcttgcattatttgctccttctcttttggctttaatggcacaccaaaaacagtggtctcacgaaatgagctaaatgaaggatgttccaaaccagtacgtattccacgacatgctttgaccatggaaaagaacaacatagtggttgatttggcagatggttcatgttgtgcatgctgaagtgctaaatcaggaactctcaattgaaataattgaacgagcacatgatactgaaaagcactccatccactctcaacatgatcattccacatcttgcataccatccgaagattcaaaatatcttccaatcgtaaataaccactcatcacaatgtaatgaaagatatcggaatgagtaaaaattgaggacagtaaaattgctttgtggactcgaccatcttcatcatcatcatgattattctttttctgctttttgaataaagaccacattttcgttggatggatgatcttgaaagaaaaaaggccttagggaagtttgtgaattttttcaagcttgaattcgttgagtgtgtgcatcattccagttcggactgttgtttggccaaaatgatccatagttcccactcaccaatacgaatgtgtctttgctgtgtccatatcctcagtatcaggtatgggtgaaaagaggttgtcgattcgggtaaccttgattttttaaggctatcataggatgggaagaaccctgatgtaaatatccttcttttaacaatactcggaaagtttttgtgttacttattcaaccaaccgttgaagccaaaagaacaattacagcaatttctttcaaaaaccatcagtaaaacacagtcctgatgacgcaaggtttattaataaccttgtttgttttggaggttttgtttttataatcggttttaaattactcagcactaaaataaaagagcaaaagccacaatttattacaaactcaacaagtcaatacaatcatcaacagtcagttcctgacgaaccatttattcattctttgaatcaaaagtgttgttttggaggtggataaggaattttatcaaggcgttcacttttccatgatcagttcggacgaaaagaatgaatcaagttattcaaattgatagagtttcaattgaatgagtccttcaatactgatagagtttcaactcttgttgaggttatcaaaaaaaaaaactcagcaacaaccttaatctcaacgaatgaagagaagtagagaggatgaacctactcatcctcctactaatccatctcttgcacacggcaatcctttcatgagtttaatcaatacaacaacaagggatgcactgacggatggttcaacttttctcaattcactgtgattgaatcccagccagtgtttgatgttccactcaatgttcatcactctataacagagaatgtggcttttgataactctaaaaagccacctcagctcaagaaagcaaaaaagaatcaaaaggtggcccaaaaatttcaagcagacaaatccttgaaaatccgactctaccccaatgaacaagaaaggacaacattgaatcagtggatgggaactgctcgttggatctacaacaagtgtttagaattcaccaacaaatccaaaggtgtcaagaaaaataagaagaatttcagaacgtttgtggtgaacaacgataattatcagacagaaaatcagtgggttgtaaatactccttatgacgtaagagatgctgccgctattgaattgttgactgcgttcaacactaattttgaaaagaagaaggctggaacgattgacaagttcatgatccgtttcaggcgaaagaaagatagaaaagatcatttcgttctacattgcaagcactggaagaaaaagagtggaatgtattcttttataaggaacatcaagagcgccgaacctttgcctgaggagcttcagtatgattccatcattattaagaacaagttgaaccattattatttatgtattccgcaagtactggatattaggggtgagaaccaagcccctcaacattcaggacaagttgtagcattggatccaggagtaagaacatttcagaccacctttgatttgaatggttattcaaccaaatggggctcaggaggtgccgaaagaattggtagattgtgttgcgcgtatgacaagttacaatcgaagtggtctcaaccagaagtcagacattgcaaaagatacaagtacaagagagcaggaagaagaattcaacaaaagattagaaatattgtggatgatttacacaagaaactgtgtttgtggctgtgtcgaaactaccaagtgatcttacttccttcgtttgagactcagaaaatggtaaagaaactccataagagaattaatagcaagacagcaagaaaaatgttgacttggtcacattacagattcaagcaaagattgcttcacaaagctagagagcatccgtggacacacatttatattgtcaacgaagcgtacacatccaaaacttgctcatgttgtggacatgtttatacggttggatcatctgaagtgtttcgttgtccatcatgtggctcaatttttgacagagatatcaatggagccagaaatattcttcttcgattccttactactcatagaattagtttttgagcaccttgtgtgttgggtcttccccaccttgtgtgcgttgggtcctttcccctggctttcactctttgagtgtttgcttgcaagatcagcactttgttcgatttgtttgttttgttcaaattgttgatttaaataaaggcgtaaggttttgggtttggagagttaagatctatcctcagcccgccaaaattaaatacaatgacgcaaaaaaataatacacccaaatgcaaacatcgtcgccaccttccgctgttgctaacacaacgagtagcagtgctgctgcaggaggaatcacaaactctgagggaactgcttcagactttcatgatgaattagctcgggatattagggaacacttgttgcaacaacaacaaacaaaagttgaaattaaacgacaagtgtccgatatggaggctgagaaggagagaaaaaattggctcattcatgtgttgtatactcggcaagatattgatgagtgtttacaagtaattgaggagcaaattaaatcgagcgaaggacgttgtgaatttgccttatacgttaaaggtttgatcaaacggcagcaaggtgatatcactcaatcacttcaattatttcaacaagcatgtattctaaatccaatgaacccacaaaatataaaacaagtcggaaagagcttgtacttgttgggtaaattcaaagaggccattgaaatttatgatgaagccaaaaaaatctcacctcaagactgggaaatttatcacaataagggtttgtgccatgccaatttgggtgaatttgaaaaggctgaagattgttatcagagagccaactccattcatcgacacgacattacattcatagaacttggtaaaattttcacaattcaagaacgatacgaagaagctattgatatctatcttgaagctcttgacttctctccagaaaatcccgaattattaagcactgttggattgttgtatttgagagttggtgataatttgaaagcatttgattatttaggaaactccctctcccatgatccttcgaacccaaaaaccattctagctacaggatccatcattcaagatcatggagaaatggatgtggcattgagcaagtatagaattgcagctaaaaagaacccaaactctgcacagctttggaataatatcggaatgtgcttctttggcaaattggattatgtgacttcaatagcatgcctgaagagagctctgtatttggcaccttttgaatggatcatttcatacaatttaggccttgttcacttgaacacaaaacaatacgcatcagcctttcattacttttcgacttctatcaatttgaatcctaattttgccagcacttacatgtacttgggtataacattgaatcgactagaggattttgaaaatgcctgctccgcctacgagaaagccattgaaatggaaagtgattatttgtttgaattgaattacgccattactctatttaatcatcagcatttagagcaagctcgtgtgcactttttagaatttgaaagattattccaagaggcccactctggtgaggatgctgaagaatgtgacgatgagtatatcctagaagcaaggaaaaaattatcatcgttattgtcatgatcaaaggtgatgaaataaatttaacacaacatatcattcccgaaattgaaatctcaagaattggcccattttttaacatgaactcgcaacaaagacgtgaacaaaaaaatgacgagaaagacttcatccacaaaaccaaagaaatcatccaagtttgattcatggtcgcaagaggagaaggacttggtccgaaatgctgttctctctattcatgaactattccctgcacgaaccccgaatgaaattttaaaaatctatttacaagaagaccgggatgaaggtcagaccattggccgattgatcatgatgcaagaagatgagctctctaaaacttctgaaaacaacaatgaaacaccaacaaccaaagatgataatagtagcaataacaacaatattccacaagcctcgtcaagtacaagctcggatcagcctcctgatccagtatctaacaaacaaccgcaacttgacaactcctccaaagaggagcttgtgattattgaagatgatggaggaaataaaaa

SEQ ID NO: 4723 - protein, 495 aa, Naegleria lovaniensis; identical to SEQ ID NO: 642

SEQ ID NO: 4724 - DNA, 5517 bp, Naegleria lovaniensis
  source 1..5517: mol_type = other DNA
tgagattttctcaaatcagtcctattgtataatactcgtatgagatgagatgaaaaatcgaatgatgccgttggagaacaagtgttatgcttattctgaccgaaaccttcttcgaaaaagcttggattaaaataccttgtttgtaaagaagtctttccacaagatctaggtcctaaaattacgactttcattaatgacgcttccaataattctccatcattggccataaaacaaaatgagctgttgctagattcaccaataagcttgcagcatctgttgatggtcatccaattataattagtaaataatctacatttttctttgaagcttttatgcatcttttctgcatatttacatgctcgtaacacttttgaatttttatccaaatattcagaaatttgtggtggtgatgtcgtgaatgtgtagaacggatgatcatgtggaacaattatttcaaagatatatttccataatatttctgaattgtgaatattttcccagagagtgatatataaatattgacaaacaagatgcaagtcgaatgcttgtcgtagtatcgaatattctctgtcatcatcttcctcctctgaatctatagtactaacatcatcgtcacacttttcaacagatgtttcttcatgatttttctctttttgcgttttgtgcactacacgttgttgttcttttataaatcctctacaatgatcacctccgcttgctgcaggtgtaaatataaaagaaatgatatggaacaacacatctccatctaattggcacaataaacagtcatgtctatttctagagaataattcttgataatgttgtttttgttccaatgcagagatctttggttttgctccgatgatggatccacttcttccgttgttgttagtactagcagtagtacttaaagttccaagaagactattcgtacttgttgtacttttaaccgaattctttctcgaggatgatggttcttcaatcttgacaaataacggatcgactaagacaaaatcctgatcaacttccgatgtttcatagataaactgattggctgatttttgttgtcgaaggcgtttttgttgttgctggagtttggtaatttcatttcccatctctgatgaattcacgttttgatattggtattttcgtttgattgatctattttttgttttttaatttttggttccattttaatgatcgttgcctgaattggtgacgacgaaaaaatgtaaatggaaactgtattggaacattagtcttctggtccagaaccacacaccataatttttgcaaatattccatcccctcaacgttcacaccagaatgtgttcagtagtcattcacacacctcgagccagaccaaaagtcatggtcataaccaaccactcttctttcagaaaatcaatgttgtaatacaatcttgcctgaattggagacgacgaaaatgtaaatagaaaccgttgaagccaaaagaacaattccagcaaattctttcaaaaaccatcactaaaacacagtcctgatgacgaggctttgttaataactttgtttgttttggaagttttgttttaataaacggtttttaattgcccagcactaaaataaaggagcaaaagccacaatttattacaaattcaacatgtaaatataatcatcaacagtcagttcctgacgagccattcattcattctttgaatcaaaagtgttgttttggaggataaggaattgtcaaggcgttcacttttccatgatcagttccgacgaaaagaatgaatcaagatattcaaattgatagagtttcaattgaatgagtcattcaatactgatagagtttcaattgaatggttatcaaaaaaaaactcaacaacaaccttaatctcaacgaatgaagagaagtagagaggatgaacccactcatcctcctactaatccatctcttgcacacggcatcattccattctgggatgagtactcacaacaagtatcggataaactttgggcatgttcaagagattcctttcatgagtttaatcagtacaacaacaagggatgcactgacggatggttcaacttttctcaattcactgtgattgaatccaagccagtgtttgatgttccactcagtgtccatcactctataacagagaatgtggcttttgataactctaaaaagccacctcagctcaagaaagcaaaaaagaatcaaaaggtggcccaaaaatttcaagcagacaaatccttgaaaatccgactctaccccaaagaacaagaaaggacaacattgaatcagtggatgggaactgctcgttggatctacaacaagtgtttagaatttacacacaacttcaaaggtgtcaagaaaaataagaagaatttccgaacggttgtggtgaacaatgataattatcagacagaaaatcagtgggttgtaaatactccttatgacgtaagagatgctgctgctattgaattgttgactgcgtttaaaacaaactttgaaaagaagaaagctggaacaattgacaagttcatgatccgtttaaggcgaaagaaagacagaaaagatcatttcgttctacattgcaagcactggaagaaaaagaatggactgtattcttttataaggaacatcaagagtgccgaacctttgcttgaggagcttcagtacgattccatcattattaagaacaagttgaaccgttattatttatgtattccacaagtactggaaattaggggtgagaaccaagcccctcaacattcaggacaagttgtagcgttggatccaggagtaagaacatttcagaccacctttgatttgaatggttattcaaccaaatggggctcaggaggtgccgaaagaattggtagattgtgttgcgcgtatgataagttacaatcgaagtggtctcaaccagaagtcagacattgcaaaagatacaagtacaagagagcaggaagaagaattcaacaaaagattagaaatattgtggatgatctacacaagaaactgtgtttgtggttgtgtcgaaactaccaagtgatcttacttccttcgtttgagactcagaaaatggtaaagaaactccataggagaattaatagcaagacagcaagaaaaatgttgacttggtcacattacagattcaagcaaagattgcttcacaaagctagagagcatccgtggacacacatttatattgtcaacgaagcgtacacatccaaaacttgctcatgttgtggacatgtttatacggttggattatctgaagtgtttcgttgtccatcatgtggctcaatttttgacagagatatcaatggagcaagaaatattcttcttcgattccttactactcatagaattagcttttgagcaccttgtgtgttgggtcttccccaccttgtgtgcgttgggtcctttcccctggctttcactctttgagtgtttgcttgcaagatcagcactttgttcgatttgtttgttttgttcaaaatgttgatttaaataaaggcgtattggaacattgaatatatatacacctattaatccacaagtgaactactgctgaccgtatctgttgaatcatctccaagatccaacgatgtactagaggtagtagtttcatcattttccttagcaatttcgagtaagaatctttgaaatgtatctctatataacatatttctcacaacaacttgcaacttgtcaaacagatccacttgaccataaccattcttgatcttactcactaatgtgaatgtttcatcttgagataaattcaattcatacttgctgtccttggttaagaattgctcaataatttcttgttgcttcttggagcgctgttgagttcgtttcatctttttgtaggtttcaatttcttccaagaatttaaagttttcatacgacttttcattcatgcaaaacactctcaacctgtttctcatttctctattcttccaataatagtcaaattcaaaggattgttgctgttctgaaaattgttgttgttgtgaaaggagagttttcttcaattcgtgttgttcagacatgtttcgtgccatcataacgtaggcatcgataatatctccgtcttgaacgacaattttcaccttactgcatgtcacattcactggaacggtcgatctaaaacgagatcgtatgacaccttcccaaacttgaacaccactttcttgagaaagttcttccaattttttgagaagtgtttccaaagtcatgccttcgaaatactcatgaatgatcttgttttgaacatttttctcagagttttcatctctaatttttccaataaccttgctttcaaacgaagagttgtagttgattattttgcctgttgcacattctacagtaatgataaaatccgtgataccattcatgacatttctgtacttttgttcttcaatagaggtacgatcgagtaatgattgagctagagcatgctctttttgcagttgtataaatgatttctccaacacagaaagcatgtaattcactctcattcccagttttccaatttcatcttttccaaatttaggtaatttaacacccttagtgactgcattactatcattttgccattcgcctgttatttgtataaccccattagtgagcttaatcattcttctcaaaacaacaagctccacaaatacaattactgagactgaaagcaaaattagcattgcagtcattacaccccaagtgattaagaatgaattaattccattcaaataaatatttcgagaaatgtctgctctcagcatgattgtgttctctcgattgacatcttgtaaaatttgaagagatgacattcgttctccataaatactctcttcttccaaaacaccagcaattgatgccgagccactagtgtcacaatatcggtctgatgttaatacactcgacgacgagtcaaaggtgccaatatagaaaaagttttgtaacaaccatgttgtgttcaaagcattaatagataaaccactgtatgaagaaatagaagatgtgtcactactatatcctgtcattgcgtgagcaacttgcatcccaatggttgaattcaaatcataaaatgaaatacacacttgtgttttggcagttaaatcttgaatgaaactactcgattgatacattccaaagatcataattccataggattgtgtgtctgtgtccatagtcaatacaggcattgcaaccatcatgatgaattcattgggatgattcacacttgttgaggaaggtctcatgaacgctgctcttctcgttgttgaaacattcatgtccttcacaaaataatgatctgaattcaatacttccaattctattggaatatcctcttccaatgtggaattataacatgcataggatctgagcttggttccgttcaaaaagtagagtgaaacaaaactaagcttgacacttgccatatacgagcaataaaagttattggaaaagtattgatccacatttccaacattgggcatgaataatttagctgt

SEQ ID NO: 4725 - protein, 225 aa, Naegleria lovaniensis
MPTQPLTKKSLSRHQKHETTSSDEDEAPEMVQSSKAKLAVAALAEQELRKQSVRDKKLKKLTKKSEKRKHSEEQEDVVDAEALHDTTSSSTKKKKLLDTAVLDFLVQQDEKQEAALESLASTKTPQIQATLETAAPKKSRSKRFVDLKLEATLAKEKVDPFTVKTEVDPAVLKFLHLEFYKKNHRKDTAKFVDAKRSTVVPASDFFGKQRWLTEQVFLNPYDLQH

SEQ ID NO: 4726 - protein, 495 aa, Naegleria lovaniensis; identical to SEQ ID NO: 636

SEQ ID NO: 4727 - protein, 361 aa, Naegleria lovaniensis
MITRTSSEPSCTISSPVESVVVVESNNSSPPICSNIHTPFIDDIIFEILHFLPSSWIIRVCMKISKQWRQVSFQIPLSLAFKSNHFKQVRESIKFLGNCECLTNLTSLDLSFNQIDNEGAKDIAMSECLKNLISLNLESNSIGNEGVKYISTSDYLKNLTCLNLKYNRIDNEGIQYIATSEFLKKLTFLNLFDNGIGNEGVKYIAASEGLKNLTTLNLVSNRIDNEGFKHIATSEYLKNLTSLNLINNRVGNEGVKYISTSECFNNLTCLNLRHNEIGCEGVKYISASECLKNLTSLNLGFNQIGNEGVKYIAASECLKNLTTLNLGSNRIGNEGFKYLTTSEYLKNLTSLDLIHNPINKR

SEQ ID NO: 4728 - DNA, 5517 bp, Naegleria lovaniensis
  source 1..5517: mol_type = other DNA
ctgtgacttcaataatatccgttagtcgatgttcgtcaataagctttacattttgatctaatactttgatggttccttccgcatcttgtggaattgaagttggctttttctttttctttgtagtagattgatgatccttttcgctgtaccaccacaaaacatctcctcggtaatttgaagatgaagcctttgattttccaaatgtaacaaatttaaaatttcctgattttacagcatcaaatctttttaatccttgtgctgcacacgccgaacaacctccctctttgaaaggaatgacttgaaactctccgtgatcacacaacgaccatagcggaacgagtgtgggcatgtttgtttgctggtatttttttctttgatcaactgaatcgtgagccttgtgcgcgaacttttttgaagaagacttgtttgggactttttattgtttattaataataacattttaattgagacaacaaggagatggtataattcttacctttttcacaatttttgaaacataattcctttcttttttaatatatctcgtttaatgttgtaaatcatagggattgagaaacacttgctctgtcaaccatcgttgttttccaaaaaagtctgaggctggtacaacagtgcttctctttgcatcgacaaattttgcagtatctttcctgtgattcttcttgtagaattctaaatgtaaaaatttcaaaacggctggatcgacctcagttttcacagtaaatggatcgaccttctcctttgcaagtgtggcctccaatttcaaatctacaaatctcttggaacgtgatttcttgggtgctgccgtctctaaggttgcttgaatttgaggtgtttttgtagaggctaatgactccaaagctgcttcttgtttttcatcttgttgaactagaaaatccaaaacagcggtatccaataatttctttttttttgttgatgatgatgtagtatcatgtaatgcttccgcatctaccacatcctcttgctcttccgaatgttttcgtttttccgattttttcgttaactttttcaatttcttatcccgaacactttgttttctcaattcttgttctgcaagtgctgcaacagccagtttagccttgctactttgtaccatttccggtgcttcatcctcatcactcgatgttgtttcatgtttttgatgacgggaaagagattttttcgttagtggttgagttggcattttttttgaacttcaagacagaaaataaaaatttcaatcaaagagcaagagcaacaagaaaataaccattttctgtgaaattatctcttctctgatttccagaccgtgtataattacacgctgaattggactaaaatccaagaactgttagccctcttcgttggcagatgcctcaaattctgctgctctgacaagatggaagaccagtcgcttgtgtcattagttaaagtcccaactagggatttggtgtgcaaatgacttcaataaatttgtttcaacttcaatacacaggttttccaatgatgagaaacattcattcaattttaacaacaagagccttgttattggaaatgatatttgttgaattactgtcgattcaaccgttgaagccaaatgaacaattacagcaatttctttcaaaaaccatcactaaaacacagtcctgatgacgcaaggtttattaataaccttgtttgttttggaggttttgtttttattaacggttttaagttgctcttttccatgatcagtccggacgaaaagaatgaatcaagttattcaaattgatagagtttcaattaaatgagtccttcaatactgatagagtttcaactcttgttgaggttatcaaaaaaaaactcaacaacaaccttaatctcaacgaatgaagagaagtagagaggatgaacctactcatcctcctactaatccatctcttgcacacggcatcattccattctgggatgagtactcacaacaagtatcggatgaactttgggcatgttcaagagattcctttcatgagtttaatcagtacaacaacaagggatgcactgacagatggttcaaattttctcaattcactgtgattgaatcaaagccagtgtttgatgttccactcaatgttcattactctataacagaaaatgtggcttttgataactctaaaaagccacctcagctcaagaaggcaaagaagaatcaaaagacgccccaaaaatttcaagcagacaaatcattgaaaattcgtctctaccccaatgaacaagaaaggacaacattgaatcagtggatgggaactgctcgttggatctacaacaagtgtttagaattcaccaacaaatccaaaggtgtcaagaaaaataagaagaatttcagaacgtttgtggtgaacaacgataattatcagacagaaaatcagtgggttgtaaatactccttatgacgtaagagatgctgccgctaatgaattgttgactgcatttaaaacaaattttgaaaagaagaaagctggaatgattgacaagttcatgatccgtttcaggcgaaagaaagacagaaaagatcatttcgttctacattgcaagcactggaagaaaaagactggactgtattcttttataaggaacatcaagagtgccaaacctttgcctgaggagcttcagtacgattccatcattattaagaacaagttgaaccattattatttatgtattccacaagtactggacattaggggtgagaaccaagcccctcaacattcaggacaagttgtagcattggatccaggagtaagaacatttcagaccacctttgatttgaatggttattcaaccaaatggggctcaggaggtgccgaaagaattggtagattgtgttgcgcgtatgacaagttgcaatcgaagtggtctcaaccagaagtcagacattgcaaaagatacaagtacaagagagcaggaagaagaattcaacaaaagattagaaatattgtggatgatcttctcaagaaactgtgtttgtggctgtgtcgaaactaccaagtgattttacttccttcgtttgagactcagaaaatggtaaagaaactccataggagaattaatagcaagacagcaagaaaaatgttgacttggtcacattacagattcaagcaaagattgcttcacaaagctagagagcatccgtggacacacatttatattgtcaacgaagcgtatacatccaaaacttgctcatgttgtggacatgtttatacggttggatcatctgaagtgtttcgttgtccatcatgtggctcaatttttgacagagatatcaatggagcaagaaatattcttcttcgattccttactactcatagaattagtttttgagcaccttgtgtgttgggtcttccccaccttgtgtacgttgggtcctttcccctggctttcactctttgagtgtttgcttgcaagatcagcactttgttcgatttgtttgttttgttcaaattgttgatttaaataaaggcgttacagtatttgaaaaaaaaataccaaaaatgatcacacgcaccagtagtgagccgagttgtacaatctcatcaccggttgaaagtgttgttgttgttgaatcaaacaattcctctcctccgatctgttccaacatccatacaccgttcattgatgatattatttttgaaattcttcatttccttccatcatcatggatcattcgagtgtgtatgaaaatttcaaaacaatggagacaagtatcatttcaaattccgctatcattggcattcaaatcaaatcacttcaaacaagttcgtgaatcaatcaaatttttggggaattgtgaatgtttgacgaatttaacttctttggaccttagtttcaatcaaattgacaatgaaggtgcgaaagatattgctatgagtgaatgtttaaagaatttaatttctttgaatctggaaagcaatagtattggtaatgaaggtgttaaatatatttctacaagtgattatttgaagaatttgacttgtttaaatttgaaatacaatcgcattgacaatgaaggtatccaatatattgctacgagtgaatttttgaagaagttgacttttttaaatctgtttgacaatggaattggcaatgaaggtgtcaaatatattgccgcaagtgaaggattgaagaatttgactactttgaatctggtcagcaacagaattgacaatgaaggcttcaaacatattgctacgagtgaatatttgaagaatttgacttctttgaatctaatcaacaatagagttggcaatgaaggcgtcaagtatatttctacaagtgaatgttttaataacttgacttgtttgaatctgagacacaatgaaattggctgtgaaggcgtaaaatatatttctgcaagcgaatgtttgaagaatttgacttctttaaatctaggattcaaccaaattggcaatgaaggtgtcaaatatattgctgcgagtgagtgtttgaagaatttgactactttgaatctgggtagtaatagaattggcaatgaaggttttaaatatctcactacgagtgaatatttgaagaatctgacttctttggatctgatacacaatccaattaacaaacggtgattcatatattgttgatgattcaaacgagtcgaagaattgtgcacagtcacttcttaaagcaatctcacacaaaggctgtgatatcttctctcaagattggccactacagatttttactctcacagactttcactcgagattggtttttgcaatgtttatttgcaaccataaaaaatgaaatcttgtcgtggttcggaagctatgtggatgataattttgtacatcttgattcatcatgttactatagcaatgaacatcatgaccaagtccagctttcttgacaccaactgtcaattgtcatcaacctcatcattgaagactttttacgttcgtccactttacaacacttcccaagacaccaaccagaaaaaatggcttcattcaatctcttcggaagaagaacaacaacaaccaacaacaaattgtactcaagaatttccgtgtccgtccgttgatgaagctttacaattaattgttcaattatttaattctaaacaaattgaaaaattagaaggaaaaataatattaatgcccggtcttgatggaaatgccatatatggaaaaaatctttgcaaaattcgacaacctggagagtgtgggcttccatgttcgatcacatttgatcaaattgtgattgaatcattcgatcttgattccatgatcacctttgattgtgaagatttacctctcttttcaaaacttcaaacgaaccaaatgatcatgtctcatatcaatgtaaagaaaatgccattcgtaatgagtgacggacttattacacaacaaacacattttcatgcagcgaatgtgtcacacgttcaaatatatgcatcatcaccttcgtttcctcaatttccaaatgctatgatatttacaaacactgaaat

SEQ ID NO: 4729 - protein, 436 aa, Naegleria lovaniensis
MTELDKEKKEIHPCFVLTLPTPSNITNDHQVNGFEETIRAIQRKLQNETWQDEDQTLGRPLSGGSNVIMIVSSANNTLTIYDCYNISIKQILAAEERTLFLTTEGEVYCCSAAGKPFQKLDIADPIEMISSRRQLLLVTKDKRVYFNESYDMALDKLVKWHDIDYPWPKDQEYPVDVSAGSTHILILTNVGNVYGFGQNYGQLGFAYGGVAYANVWRKSETSHITGKIIRVFTTYNTSFILTNEGKLYTCGDRSYGASGLPNDTNTPTHYWTLVPKLETEFVTDVRTGLFFVAVLCKSSNVYIFGYFNFYQFGRIASTNAGVNSTPMLLDTFDQTNIEDIACGGYNSMILTKNKEVYVGGVGRNALNPNNSGEYSKLEWAQILKQVYTGCTFSNSNVSMHMGNTFYALHISKNTSVLRFFNFRNIWKVADVIFQFE

SEQ ID NO: 4730 - DNA, 5568 bp, Naegleria lovaniensis
  source 1..5568: mol_type = other DNA
atttgccagctcatattagaaatgatgaaaaagtgattagtttttctgttgcaacaaatggtatcaatttaaagcatttaacacgagcacatcacaacgaccgagatttagtcctggaagcagttaaagagaatggcttggctcttgctttcgcttctaaaacactgaaaaatttagacccttttattttttcacaagccaatcaaaataatcaactggtacaatacttttccgatcgagttggtgaagaaacgaagcttggcgtgaaaccaacaacacttggaatagctgagaatgatgattttattgatcaatttaaggaaaatctacaacgtggtatttacggatggggtattgaacatttaacacaattccaaagggatattattcaatccatttgtgatcaaaaaaaccgtaatatactcattgaaggcccatgtgcctcaggtaaaaccattgcctccattattggagtgttgaacaagggcttggatgattcctcaactgcgccacctgaccaagtacagtgcttgataatttgccccacaaaagaaatggtttatcaaattcaactattttttacatctctctgtgaatacatgagtgacatatccattggtaatagtacatgtggatggaccacattctattcagcagaatttgccaagtcatatcgagtgctaattggtactccaggacgaatagctcacaaatcaaaatattatttagaattgtctcatgtaaagacagttatatttgaaggatcagatcagttattagcaggagaattcggcaatgagctcaatctgatctttaagaaattatccaacaattgccaaagtattcttatttcttcgttattttcgccaaaacttattatgagaatagcgaaaatatttacgaatgaaaatttcaaggttttgagagtaccattgttgccttccaatcaaccacacaagtatcaatttctcgaattgacgaatgaagaagaaaaatggacacttattaaggaaattattcaagaccactccaatatgttgaccatggttttttgcaattcgagaagaaaagcagagatgctttgtgaagaattgaataatgttggattttgttgcaatgtcctccatggtgatattgattgtcaacaaagggagcttattttgaacgactttagaaaaggagcatttagagtacttgtttgtagcgatttgatggctcgagggatatcgatatcacaccttgagcttgttgtaaattttgactttccagagaacaaggttgtttttattgaaaggatgggacggctgttgcaccccaacctgagtaaggaaaaacaaatcatttcttttgtaaccaaagagtttaagaaaagagcaaaagcttggcgtagagaattgggtatggaaaatcatgaagataattgatagagggtagaaataatttcacatctatgagttgcagtttacaattcaagaagccttgtgtgcaatattatttataatcaataatttttcactaactcaccgttgaagccaaaagaacaattctagcaaattctttcaaaaaccatcactaaaacacagtcctgatgacgcggctttattactaaccttgttcgttttggaggttttgtttttataatcggttttaagttgctcagcactaaaataaaagagcaaaagtcacaatttattacaaattcaacaagtaaatataatcatcaacagtcagttcctgacgaaccattcattcattctttgaatcaaaagttttggaggtggataaggaattgtcaaagcgttcacttttccatgatcagttcggacgaaaagaatgaatcaagttattcaaattgatagagtttcaattcaacaagtcattcaacgctgatagagttgaggttttcaaaaaaaaactcaacaacaaccttaatctcaacgaatgaagagaagtagagaggacgaacctactcatcctcctactaatccatctcttgcacacagcatcatttcattctggcagtacgcaacaagtatcggataaactttgggcatgtgctagagattcctttcatgagtttcatcagtacaacaacaagggacgcacagacggatggttcaacttttctcaattcactgtgattgaatccaagccagtgtttgatgtcccacccaatattcatcactctataacagagaatgtggcttttgataactctaaaaagccacctcagctcaagaaggcaaagaagaatcaaaagacgccccaaaaattacaagcggacaaatcaatgaaaattcatctctaccccaatgaacaagaaaggacaacattgaatcagtggatgggaactgctcgttggatctacaacaagcgtttagaatttacacacaacttcaaagatgtcaagaaaaacaagaagaatttcagaacgtttgtggtgaacaacgataattatcagacagaaaatcagtgggttgtgaatactccttatgacgtaagagatgctgccgctattgaattgttgacggcgtttaaaacaaactttgaaaaatagaaagctggaacgattgacaagttcatgatccgtttcaggcgaaagaaagacagaaaagatcatttcgttctccactgcaagcactggaagaaaaagagtggactgtattcttttataaggaacatcaagagcgccgaacctttgcctgtggagcttcagtacgattccatcattattaagaacaagttgaaccattattaattatttatgtattccacaagtactggatattaggggtgagaaccaagcccctcaacattcaggacaagttgtagcattggatccaggagtaagaacatttcagaccacctttgatttgaatggttattcaaccaaatggggctcaggaggtgccgaaagaattggtagattgtgttgcgcgtatgacaagttacaatcgaagtggtctcaaccagaagtcagacattgcaaaagatacaagtacaagagagcaggaagaagaattcaacaaaagattagaaatattgtggatgatctacacaagaaactgtgtttgtggctgtgtcgaaactaccaagtgatcttacttccttcgtttgagactcagaaaatggtaaagaaactccataggagaattaatagcaagacagcaagaaaaatgttgacttggtcacattatagattcaagcaaagattgcttcacaaagctagagagtatccgtggacacacatttatattgtcaacgaagcgtatacatccaaaacttgctcatgttgtggacatattcatacggttggatcatctgaagtgtttcgttgtccatcatgtggctcaatttttgacagagatatcaatgcagcaagaaatattcttcttcgattccttactactcatagaattagtttttgagcaccttgtgtgttgggtcttccccaccttgtgtgcgttgggtcttttcccctggctttcactctttgagtgtttgcttgcaagatcagcactttgttcgatttgtttgttttgttcaaattgttgatttaaataaaggcactgaccaatttacccttttttcgaataaatgtccattttccgtgaatagtgagcttgttgatttgactattagcgaatgattgaatccaagagttgtgaaaggttaatttactaatggttataggcggtaacagttttcataaagccgtgtcgactattcaaactgaaatataacatctgccactttccaaatatttctaaaattgaaaaatctcaaaacagatgtgtttttggaaatgtgcaaggcgtaaaaggtgtttcccatatgcatggaaacgttggaattgctaaaagtacatcctgtgtaaacttgttttaaaatctgagcccattctaacttggaatattcaccagagttgtttgggttgagagcatttctacccacaccacccacgtacacctctttgttttctattgatcaagccatgcatgaaaaaattaaggaaatactttagccataacttggattcaaaaacttgtcaaaatcatagaattgtagcctccacaagcaatatcttcaatatttgtttgatcaaaagtatccaagagcatgggagtactgtttacacctgcatttgttgaagcaattctaccaaattgatagaaattaaaatatccaaaaatgtaaacattcgatgacttgcataaaaccgcaacaaaaaacaatccagtcctcacatcttttggatttaagagtcgacatgtaaaagagaaaactaacctgtcacaaattcggtttcaagtttgggaacaagagtccaataatgagttggagtgtttgtgtcattgggcaagccagaagcaccatacgatcggtcgccacaagtatataactttccttcattcgtcaaaataaaactcgtattataggttgtgaagaccctaataatttttccagtaatatgtgatgtttcagattttcgccaaacattcgcataagcaacgccaccataagcaaatcctaattgaccatcttttggataagtgtatatttaaattcgccatggcggttaatatcgtggacatgtctgatcctatgacttacaattttgcccaaagccataaacatttccaacattagtaagaattagtatgtgtgttgaacctgctgatacatcgactggatattcttgatcttttggccaaggataatcgatgtcatgccactttacaagtttatccaatgccatatcgtaagattcgttgaaataaactctcttgtctttagtcacaagtaataattggcggcgtgacgatatcatctcgattgggtcagcaatgtcaagtttttgaaaaggttttccagcagctgaacaacaatatacttctccttctgttgttaaaaaaagtgtgcgttcttcggcagccaatatttgtttgatagaaatattataacaatcataaatagtgagagtattgttagcggaactgacaatcatgatcacattagatccacccgataaaggtcttcctaaagtttgatcttcatcctgccatgtttcattttgtaattttctctgaatggcacggatggtttcttcaaatccattcacttgatgatcgttggtgatgttggaaggggttggcaatgtgagtacgaaacatggatgaatttcttttttttccttgtcgagttcagtcatttttttttttcaatttcaacctcaaaaatgagcaacgacaaagagaaggaagctcttgcactggagaaggaaggaaagaaactgtatgtatttgtatcaggaatatatagttcatgatcatgtccaatccgaatggaatatatgattgcttccactctagtgcctccaagagcttaatgaatttttttaagcctgattatgattctgctgcagctgcttttgagaaagcagccttaatatacaaacaattaaaactgccagcaaaagcgatccaatgctattctcaatgtggtgaatgtttcggtaaatgtggaatgtaagtaaagttggaaagtgtttcggaagagaaacaatga

SEQ ID NO: 4731 - protein, 120 aa, Naegleria lovaniensis
MSIIVASHHQNILIILLLVNLKEHVALLPCFQILNMNPTIHTLLFNLNIPGIEVLLTKEFKLKQYSNNDIVEFDKLEQQWNRTHQPHNLLQNFKNKQSNAHITIGGITYHKQQIEKPEAN

SEQ ID NO: 4732 - protein, 258 aa, Naegleria lovaniensis
MKIRIRFVGYNNKGCTDRWFNFSQFTVIESKPVFDVPLNVHHSITENVAFDNSKKPPQLKKAKKNQKVAQKFQADKSLKIRLYPNEQERTTLNQWMGTARWIYNRCLEFTNKSKGVKKNKKNFRTFVVNNDNYQTENQWVVNTPYDVRDAAAIELLFNINFEKKKAGTIDKFMIHFRRKKDRKDHFILHCKHWKSKKGQYSFIRNIKSAEPLPKELQYNSVIIKNKLNHYYLCIPQVLDIRGENQAPQHSGQVEALDP

SEQ ID NO: 4733 - protein, 162 aa, Naegleria lovaniensis
MVHFRRYGLAPAGKVKLLTPHVPASEHSSNSSHKYNGGRKKLRKHFQHNNKYKSGAHRLVSSFEPPNQSSSSLDNEEHGTPHYLSNSEHKFNTLEGMNRLEFQWTIVHEKRLQIKAEAFYNRNNKNHKKWHRNHPKDGFYQLRQVFEAHHETNEEEKEDENV

SEQ ID NO: 4734 - protein, 434 aa, Naegleria lovaniensis
MFTHSSNRLTAHKTSLLLVLLLLLSACLIICSLSSVQARGRGRSTPTTSKQRARAYWKKNLSLRDARKIHRIRAQMKRTRRTLKGLKLELSSSKCSQKRRRLIKRLIKRRRQRLQQLRRGLRRSLRRVVRKAANKRRASRSRRRRSAAVKCTKRNRKLRKCKRIAKRRLARLRRQLRRRIAAAARRRRASRRQGRSRKCTKRNRRLRKCQQRRRQHRQSRGKKLLRRIMRRVRARALRAAARQRRALLRKLKRQQRRAAARRAARRAARRAARRRAARRAARRAASRRQRRSRKCTKRNRRCQRKRSSRRFLVLAFNKREFLRKLLRRRSHRYYGLRGFKRYARLVTLLKWIRAKRASRRSRYFRVKERRILRGLRLLRSRFAKLRLSPRRRRRSSSTKVTRIVIHGVQNKKQVKLVIPKRLKNKIKRVIVYRV

SEQ ID NO: 4735 - protein, 607 aa, Naegleria lovaniensis
MTIARHAKSSSPSKPQHLPPVKISCQDVLQYFEMKFDAFIDYPPARQCFFTFLESTQNTEITLFLEQIEIFKSLHSSSSSHNYHPSNSTSTADSSNTSSTTSTSSKKSSIDYYFDHETVEDIFEHHLHGAPTLSQAALLKACEIADTFIQDHAPNELNLKSDTKKKILEKIEKNRIFYGLDKEQLVVREENDDVKGKHVSAVPFLDSTIFDDLEAHILLSLKSNQFANFLASDIFKDFVENESVETLFILGTPRSGHQGISTGGVDFLQLLNSKHSRKTFSTRISLNSHNIFTLNEALTLREVQYLRNTLLQYDHTSPNWTLLSYSKEQEIYATVMDGDSFCEKLFGRKDMMFYKSVTHYQYGSDRVYKALIDVEFRKFHTTEPVSASEISKYIQSGGKSQLLTASLNQQLDTVILTELYEMKWPIRNREFMTSCAGVQVTHSTSVNSGTFQSNNDNDNRTTVSSSLSNLDTFYLFKKSCNNNQYDLQLLGSEHSLFNSSTANASSHSKFKNTVQGYCLSALKVEPTSSTSCKTTHVMFVDMKGLLTQNWAQKILTHKSKSGKKHVTLLKTPQQQMTQWIEKDSLMALHSPVTDAILKTLSENVNIF

SEQ ID NO: 4736 - protein, 476 aa, Naegleria lovaniensis
MSQQMNEMVDSNVVEERNIFWKRYFIEKIANPKFMSKTSSKRIVKPALTFSLEYISKHYVETMFSSKVSQKDTDDDGNEDQECEIISNAAQFFWSPFPQYTGKSIESGDDYIALGESKVGGYPDFPRDFEWPKDENGEEWIFAAQINVRQLEYYSFSNSGILNQGGMIYFLFPKDATGCRSYWGLRKQDHQPVTYLSSKQITEMGGLERRIPVKKKKQQSFQDSSLTSQVEELHDDDDDDDFEFDEEHPDHLFCSPNRMVFFRNVGFYPLFGRQSLGFIVENQHCANFTTIENHDYFHVNLSNVFGSPFSLLPTVMGLPETSIDKNRLYVNVMAWELDLSLLPSDIIVFQSCPELEFKMYQGLDHATPVLHFAKTTWSNGIYLSYSLVENWNVLHGTCSFLYRLANEEEQKTLTQTCEYLKADQRFRTLGKVLDLDAYNMNLKSWCGEGWMFFLPFHYFELNTGPVKDSYVLSFDP

SEQ ID NO: 4737 - protein, 306 aa, Naegleria lovaniensis
MKSNNHSSDVLNLENKMLLFFSEQRQFESMMRKQCTTYQLQLSEREEESRVLSEENGRLSLKVSELNAKLYNLTFDIEVKEKVYLHQIQKLETDFQSAESKFHHQLEQLQTMNTELTQQIERLKHLLETKEVTLQENIQQQISKLYEEIEQKDLLLSTQMKSFSNEKAHFTKHIHQIQSENFSLKTQLHDSDKKAIQLLLLIQDLKNETDSLRQEYSLAFETLKQEFKQVQIRHFQKFSTSFKSEESEKPSISPRCEHDSQNLTSRKAFSLPSSPKAQKSSCPLQLHYVPEKNGTKEKNSSRTCSL

SEQ ID NO: 4738 - protein, 716 aa, Naegleria lovaniensis
MGQRLSLNIATISRLEDLIPISASGSGNDDGEGEGPPDRSEALAEEQQNTIRLKLLKANVVSAATSHHGNNIASSASPKSFASADRRRRGNDAAFKHELGRRPSYSSDNISQPSFGEEQTALILEKMKNIGPIQQFVEQLSNEEKLLKSYLDFNWMTTVALIERSASESMRFLSKGIGDFFNVAIHEMQLKISDSQADLTSMESIHGQQYVEVKLAIVPYIHFSEGSSFSTISFPVLDHFPVDSEDEPFVNVSPRTNNLSHNNHHNSSGGSSSSPLRINVTKTPSKFTLALIVGPWLVFFDPLTSLIIPKKLYGMAKIIASNLPELFITKQKEKLTEKLAQCIVSWNTSKLFKNEKDMFCSPRQNSTSSPPQQSMYGNGIDFIDDYMRNYLNIDYTTFPLVRYFKTFLGNARQQGWSQMVIDLDESLIGKYGPVLTPTTPLSCFDFSNPNTKLANSNNVNQFAHKPPHGGGTAMCTLVIESHEELDNIIKDMMIHDLMENAASYQQFERTSTPETPLGSEPSSLCATSKKEGNKMSTTQQQPTFPTTISESDNVTNMRKKAPPVSHFFIDVLKMFDRAWWMRHLFDVNEEHVEVSTPSHKKHVSTTVQSSGDSPSQIRHTRDYISEIGCPFGHAIPDYEKNLECYPRRRKKKLKQQVISRPNSPSSPNTSRRSITSLSPRKSPSIRSNASPKTPIQPFPQTSNESIPLDSLNEIKR

SEQ ID NO: 4739 - protein, 404 aa, Naegleria lovaniensis
MYNNNSEKSSLSSSRGGRGYDHSYNTRGGGTRGGRGYASRGGRGGGTRGGRGSYHSHHHHSNSYYHHPSSNNRSHYQNDPYNNNNNNHHQNNNYHNTFDNTAHGEEENYFAQLQQDSINQPYYAQNRGSPSSDYNYEMAQQYEELPQQQFQPPPVQQTVPQQTQPTLVVHQQQPSSQFTNSYGHISNSIKFTSQPIHSIDYIQNDPANSNMMNSQQVPPHNYYSTYPQQPLSSEHGPIPSTSNYYHPPPPPSAIQGVPQHMGYQTSYYSKGIRLPQSQRDLLSDCSTLSSTSSFISQDQHSIDSHSSFSQERQQIQAVRITGIPNQLSIPQFLSLLKSNVPILNGNIKNEHLVKPISNPKFPDSYYIFLNINGVDGFEAIKNHLNNSSSSSIYGSTISASLKFN

SEQ ID NO: 4740 - protein, 288 aa, Naegleria lovaniensis
MEVKIAVIGSGGVGKSCLTLRFTQETFSENYDPTIEDSYYKFTELENSQQCGFSILDTAGQEEFKSLRESWMKHADGFLLVYSMDDKKSFESILEFYEQILRVKDTDSWPAIVVVGNKADLEDSRRQVTADMVTKFIKQYDLDHFDCSALSGLNVKKAFQRTAKYVLIHKGVKLLEEVVHTPQNSEVNISISAPPDNCHDDNACHQKDILSTSNSHGKLSSLDGGGGSSPSLWRRTTSDAPSSNLNSQIDASPTTPSFISNSNHSGKSLGSYTPEPKSSEKKMKCVIL

SEQ ID NO: 4741 - DNA, 19187 bp, Naegleria lovaniensis
  source 1..19187: mol_type = other DNA
actaggggttgcgagggttttggaattgccaacaatgagtgatttcaaagaattgaggtttttgatgttagaatgaatgaattttacgaaatccaattagaagaagtgcatccgatttctttttacgattgttttcgattaagattccaatctcaaatgtcctttggagacattgtaaaatcatcgaccatttgtctttggttgaccttaaaaacatgactttttgtctgttcgattctttgaacatgttgatatgaagataatgaaacgataaatatcgaattgcaagggttgtagatttttcaaagcacgtctgacgagggccctttcaaaccttcagccgcagcaaacagccattcagccaggatagtcctcgctgccgaaattattttcagatgcaatcaacagaatcctttggcatccggttgaaacaggatttttgcggctgagataggatttcgatcaggtgatcagtttattttgctgactaaaaaaccgttctccacaatgacggttcttaaaatatttcataaaatctttaaaaacgtccatccaggcaaaggtttttgttcttcttattcctttttgtccactgtttgatttgcttaatttggcagatgtagacatgattgttttcatctaattggagaacataatcaccaatgcttaaatattcggaattgagagtctaatttgcttctggtttttcaatttgttgtttgtgataggtaattcctccaatggtgatatgtgcgttggattgtttgtttttgaaattttgcagcaagttgtgtggttgatgtgttctgttccattgctgctccaatttatcgaattccacaatgtcattattcgaatattgtttcaatttgaattcttttgtaagtaaaacttcaataccaggtatattcaaattaaacaatagggtatgaatggttggattcatattcagtatctgaaagcatggcaaaagtgcaacatgctctttcaaattcaccaataacaatataattaatatgttctggtgatgggaagcaacaataatactcatatggtaatcttgtggattgatctttctctttgttgaattgtaagccaacaattaaggcacttaaaaaattattgagagcattcaagaaattttcagcgttcagattggtattggagccacaatattgtcgagccactccataaaaattctcgatcatatattcttgcagttgaaaaggcaaaaatactctgttgttgggtgatgattgaactctatacattgtcaaacaaaccgatcattaataacaacaataatggataaattgacaatttatctaccttgaagtcgaagtataaattgactcattatcaatttcgatgtcagtattgttatgatttgtttctttttctttgaggaagatgcgaacgattccacaaagctcttttgttatgaacatttgtttgacatcatcttcaatcataattttgtttttacgtgaaatctttggtttggattatcattttcgggttgcattcggaaagaaatcactgcttcacatgaagtgcaaatgacatgatctcttcatcatcaaataaatttagaacagcaatgcttctgatagcattttcttcaaaaatacgaattactgaattgatgtctgatggtgtgaattttatatcggtaagatagtcatagagaagatgaagatcagaattcgtttcgtgggtgtaagttgatgtggattggttgtctagctccacatttgaattcatttcgttcaaggataacatgccaaagcttgttcggaattgttgttgttgctgttgttttgcatttttattgttaaaaattttattcgttgtaaagccaaaaacaaccgccaaaatccgtaaacatccggattctggaggattctggatttccacaaagtttgggaagtcagcaggagctggcagccgtccttttcggctgtttgctgcggctgcgggtttgaaagggccctctctttgggcatgttcaagagattcctttcttgagtttaatcagtacaacaacaagggatgcacagacagatggttcaacttttctcaattcactgtgattgaatccaagccagtgtttgatgttccactcaatgttcatcactctataacagagaatgtggcttttgataactctaaaaagccacctcagctcaagaaggcaaagaagaatcaaaaggtggcccaaaaatttcaagcagacaaatccttgaaaattcgtctctaccccaatgaacaagaaaggacaacattgaatcagtggatgggaactgctcgttggatctacaacaggtgtttagaattcaccaacaaatccaaaggtgtcaagaaaaataagaagaatttcagaacgtttgtggtgaacaatgataattatcagacagaaaatcagtgggttgtaaatactccttatgacgtaagagatgctgccgctattgaattgttgttcaacattaactttgaaaagaagaaggctggaacgattgacaagttcatgatccatttcaggcgaaagaaagacagaaaagatcatttcattctccattgcaagcactggaaatcaaagaaaggacaatattcatttattaggaacatcaagagcgccgaacctttgcctaaggagcttcagtacaattccgtcattattaagaacaagttgaaccattattatttatgtattccacaagtactggatattaggggtgagaaccaagcccctcaacattcaggacaagttgaagcattggatccatgagtaagaacatttcagaccacctttgatttgaatggttattcaaccaaatggggctcaggaggtgccgaaagaattggtagattgtgttgcgcgtatgacaagttgcaatcgaagtggtctcaactagaagtcagacattgcaaaagatacaagtacaagagagcaggaagaagaattcaacaaaagattagaaatattgtggatgatctacacaagaaactgtgtttgtggttgtgtcgaaactaccaagtgatcttacttccttcgtttgagactcagaaaatggtaaagaaactccataggagaattaatagcaagacagcaagaaaaatgttgacttggtcacattacagattcaagcaaagattgcttcacaaagctagagagcatccgtggacacacatttatattgtcaacgaagcgtacacatccaaaacttgctcatgttgtggacatgtttatacggttggatcatctgaagtgtttcgttgtccatcatgtggctcaatttttgacagagatatcaatgcagcaagaaatattcttcttcgattccttactactcatagaattagtttttgagcaccttgtgtgttgggtcttccccaccttgtgtgcgttgggtcctttcccctggctttcactctttgagtgtttgcttgcaagatcagcactttgttcgatttgtttgttttgttcaatttgttgatttaaataaaggcgtatctgtgtcaagagtatatctataaataacacatctttcaaaaaacaaacacaacaatggttcattttcgcagatacggattggcacctgctggaaaagtcaaattactaacacctcatgtgccagcttccgagcactcttccaattcttcacacaaatacaacggaggaagaaagaaattgagaaaacattttcaacacaacaacaagtacaagagtggagctcatcgattggtgtcgtcattcgaacccccaaatcagagctctagttcccttgacaatgaagaacatggaactccacactacttgtccaatagtgaacataaatttaacacactggaaggaatgaatcgtttggaatttcaatggaccattgttcatgaaaagagattacaaatcaaagcagaagctttttacaatagaaacaacaaaaatcataagaaatggcatagaaatcatcccaaagatggattttatcaattgagacaagtgtttgaagcacaccatgaaaccaatgaagaagaaaaagaagatgagaatgtttaactggaacagttcttgttgattaatatttggcaaacattgaacttcaccatttgattgaaattaagatgatgaaatgataggtgagtcccttaatcataaagtcatgacttgtaaaacaaagattattatggaaagttaagatctttgaagaagagccatgaaaaactgctctaacatgggaaaatattttggtgaaatagatgtcgactctgcattgattcactctctccataaaaccaaactgttattaatacaatcagtcaggaattaattttgacatcgttcactgctacatgatcgttcatgcctgtgatacagaaatctctctcacaccgagttcattctaaggttacactcagtgcacggacgaatcaacaagaaaaacatcactgaacatcatttttcgtcgggtcatccactacaagcccatccgtcagatgccacaatacaaaattagcactcaaaaaaaaatgttcacccacagttcaaaccgcctcacagcacacaagacaagcttgttgttggtcttgctgttgttgttgagcgcatgtctcatcatttgttctctctcctcggtccaagctcgtggtcgtggtcgttccacacctacaacttccaaacaacgagctcgagcctattggaagaagaatctctctctccgtgatgctcgtaaaatacatcgtatccgagctcaaatgaaacgcacaagaagaactttgaaaggtttgaaattggaattgtcatcttcaaaatgttctcaaaaaagacgtcgcttgattaagagattgatcaagagaagaagacaacgattgcaacaattgagaagaggattgagaagaagtttacggcgagttgtgagaaaggctgccaataaaagaagagcatcgagatccagaagaagaagatcagctgctgtcaaatgtaccaaacgaaatcgtaaacttagaaaatgtaaaagaattgcgaaaagaagattggcaagacttcgaagacaattgagaagaagaattgctgctgctgctagaagaagaagagcttctagaagacaaggtcgttctagaaagtgcaccaaacgaaatcgtagacttagaaaatgtcaacaacgaagaagacaacatagacaatccagaggaaagaaattgttgagaagaatcatgagaagagttcgagcaagagctttgagagctgctgctagacaacgaagagccttgttgagaaaattgaaaagacaacaacgacgtgctgctgcaagacgtgctgcaagacgtgccgcaagaagagctgcaagaagaagagctgctagaagagctgcaagaagagctgcttctagaagacaacgtcgttcaagaaaatgcaccaaacgaaatcgtagatgtcaaagaaaaagatcatcaagacgtttccttgttcttgcatttaacaaacgtgaattcttgagaaaattattgagaagaagatctcatcgttattatggattgagaggattcaagagatatgctcgattggtgaccttgttgaaatggatcagagcaaagagagcttctcgtcgttctcgttattttagagtgaaggagagaagaattttaagaggtttgagattattgagaagtcgttttgccaaacttcgtctctctccaagaagaagaagaagatcttcttcaaccaaagtgacaagaattgtgattcatggagttcaaaataagaaacaagtcaagttggtcattccaaagcgtttgaagaataagattaagagggtgattgtctatcgtgtttaatcaacaccactgatgattgtgaataaaaaacgtgatgattttttggaacgtgtgttgtgaattcattgaacgaattaattttcatattaaggtaataattttaacacacacaccattgtcaagtgatcattttccaaaggctttttagatgatcagtttcaattgctctcatgagacaagagcgactctttgcagcaggtctgtatcaaagaaagaaggagagcactctgttcacaaaaaagcatcaatttcattctgaaaaaagaaattacaaatccgcactgtcaacgattcataattatcgcaaaacaaaaattcgcaacgagaaacattgagtgtgccgctgagtacaattgtcatcattttagaatgaccatcgctcggcatgccaagtcatcatcacctagtaagccacaacatctgccacctgtcaagattagctgtcaagatgtcttgcaatattttgaaatgaaatttgatgcttttattgattatccaccagcacgacaatgcttttttacgtttctcgagtcgactcaaaatacaggtaggtttatattttgtgtttggccatgatgatgtgttgacatttggcatgctcatcaacaccatgtcggtatattctcacatgctgctccgcaaccatcatggtgctttcacacaccatgcaatcatgaaaaatatctggcaactcttttttgtcccacttccaaatatagaaatcacactctttctcgaacaaattgaaattttcaaatctcttcattcttcgagctcttcacataactaccatcccagtaactccacctcgactgccgattcttcgaacacttctagcacaacttcgacaagctcaaagaaatcttcgatcgattattatttcgatcacgagacggtcgaagatattttcgaacatcatcttcatggagctccaacgctctcgcaagctgccttattgaaggcttgtgaaattgccgatacatttattcaagatcatgcaccaaatgaattaaatttgaaaagtgatacaaaaaagaaaattttggaaaaaattgaaaaaaatcgaattttttatgggcttgataaggaacaacttgttgttcgagaggaaaatgatgatgtgaaaggaaaacatgtgtctgcagttccatttttggattcaacaatttttgatgatttggaagctcatattttactttcactcaaatccaatcaatttgctaattttttggcaagtgacatttttaaggattttgttgaaaatgaatctgtagagactctcttcattttgggaactccaagatcaggtcatcaaggaataagcacaggaggagttgattttttacaacttctcaattccaaacattctcgaaaaactttttcgactcgaatttcactcaattcacacaacattttcacactcaatgaggccttaacacttcgagaagttcaatatttaagaaatactcttctccaatacgatcacacctctccaaattggactttattgtcatattcgaaggagcaggaaatttatgcaacggtcatggatggagattcattttgtgaaaaattattcggaaggaaagatatgatgttctacaaatcagtaactcattatcagtatggatctgatcgagtgtacaaggcactcatagatgttgaatttagaaagtttcatacgacagaaccagtgagtgcgagtgaaatttctaaatacattcaatctggaggaaaatctcaacttctaactgcatctctgaatcaacaattagatactgtgattttgacagaattatatgaaatgaaatggccaattagaaatcgagaatttatgacaagttgtgcaggtgttcaagtcactcattcgacaagtgtgaactctgggacgttccaatccaacaacgacaacgacaacagaaccactgtttcttcttcattgtccaatttagatacattttatttattcaaaaagtcatgcaacaacaatcaatatgacttgcaattgcttggttcagagcattcacttttcaattcttccacagcgaatgcatcatcccactcgaaatttaaaaatactgttcaaggatattgcttgagtgcactcaaggtagaaccaacctcatccacttcatgtaaaaccacacatgtcatgtttgtcgatatgaaaggtttattgacacaaaattgggctcagaaaattttgacacacaaatccaagagtggcaaaaaacatgtcacgcttttgaaaacaccacaacaacaaatgactcaatggattgagaaagattcccttatggcactccattcgccagtgacagatgcaattttgaaaacccttagcgaaaatgtaaacattttttgagagaaagaaaaagcgaacttgtaaaactattcaacaacacgatgagtataaagatatcaacttgtacatattatgatgacattttctaatgattcgaataaggttctttttacgggtcaaaacttaacacataggaatccttgacagggcccgtgttcagttcaaagtaatggaaaggtaagaaaaacatccatccctctccacaccaacttttcaaattcatgttgtaagcatccaaatccaatacttttccaagagttcgaaatcgttgatcagcttttaaatattcacaggtttgcgttaaagtcttctgctcttcttcgttggcgagtcgatacagaaatgagcatgtcccgtgtaatacattccaattctcaacaagtgaatatgataaataaatgccattactccaagtcgtttttgcaaagtgtaaaacgggtgttgcatgatccaaaccttgatacattttgaattcaagttctggacatgattggaatacaataatgtcacttggaagaagtgaaagatccaattcccatgccataacgttcacgtacagacgattcttgtcaatgcttgtttcaggtaatcccatgactgttggcaacagtgaaaagggactaccgaatacattggaaagattaacatgaaaataatcatggttttcaatggtcgtaaagtttgcacaatgctgattttccacaatgaatcccaatgactgtctaccaaataacggataaaatccaacatttctaaaaaacaccattctatttggagaacaaaacaaatggtcgggatgctcttcatcgaattcaaaatcatcatcgtcgtcatcgtcatgtaattcctctacttgagaagtgagtgatgaatcttgaaaagattgttgcttcttctttttaacaggaattcttctttcaagcccacccatctctgtgatttgttttgaactcaaatacgtcacaggttgatggtcttgttttctcaggccccaataacttctacaacctgttgcatcctttggaaacaaaaagtaaatcattcctccttggttgagaatgccagaatttgaaaaactgtaatattccaattgacgcacgttgatttgagcagcaaagatccattcctccccattctcatctttgggccattcgaaatcacgaggaaaatcagggtagcctccaacttttgattctcccaaagctatatagtcatccccggactcaatggattttcctgtatattgtggaaaaggactccaaaagaattgtgctgcattggaaataatctcgcattcctgatcttcattgccatcgtcatcagtgtccttctgagataccttgcttgaaaacatggtttcaacataatgtttcgaaatgtattccaaactaaacgtcaacgctggtttcacaattctcttgcttgaagttttgctcataaacttgggattggcaattttttcaatgaaataccgtttccaaaatatattcctctcttcaacaacattggaatcaaccatttcattcatttgttgagacatcacaggtggaataatgggcataaaccccaatctccttgaaaccatcaatttccaatccaatacatttgaaattactgcattccaatatttgcatactctcgcacacctcttgcaaagctcacatccatttaaatttccaaatatttcaatcagaacatcctgatgcaataccatggacgattgcgtacatgattgtaaaagttctgaatttatttttcgcttcttcatttcgtccgatagagaaaatatttcttcttcttcttgttttgttgatgatgatgaatattcataacgaacatgttcgagaggagtttttctctttcgtgccatttttttctggaacgtaatgcaactgtaacggacaagatgacttctgagctttgggagaggatggaagagagaatgcttttcgtgatgtcaggttttgggagtcatgttcacaacgtggagaaattgagggtttttcagattcttctgatttgaaacttgttgaaaatttctgaaagtgtcgaatttgaacttgtttaaattcttgtttgagagtttcaaacgcgagagaatattcttgacgaagagaatccgtttcattctttaaatcttgaatgagtaatagtaattgaatggctttcttgtcagaatcgtgcagctgagttttgagtgaaaaattttctgattgaatttgatgaatgtgttttgtgaagtgagctttttcattcgaaaaggatttcatttgagttgaaagtaagagatctttctgttcgatttcttcataaagttttgagatttgttgttgaatgttttcttgaagtgttacttctttggtttccaataaatgtttgagtcgttcgatttgttgagtaagttcagtgttcattgtttgaagttgttctaattggtgatgaaatttcgattcggcagattgaaaatctgtttctaacttttgaatttgatgaaggtaaactttttccttgacctcaatgtcaaacgttaaattatagagctttgcattcagttccgaaactttcaacgataatctcccattttcctctgacaacactctactttcttcctctcgttcggaaagctgaagttgatacgttgtacattgttttctcatcattgattcgaattgtctctgctcagaaaaaaataacaacattttgttttccaaattgagtacatcacttgaatggttattcgatttcattttgatagaattattggttatattctcactcatagattggacactagtgtcggttggttattgatttgttttttcaaggagtgtgtttggattgtcatctctgtgtgcgttttaaacaaactccaatactctaaaaatgaaatcagtcaagatgcaaaccacttgttggagagcgtttttggaatttgaaaaatcctcaaaaggagacaatacaaggacatggaagtttgggactccattgatgttgagatgattgttcgtgatattcattgaattggtgttgcatttcggacaggaggatgtcatttaatggaaaagagatattccaattttggaagaaatgttattttctgaacgagatcgttgcaggaaaaaaatattttcattgtttggatttgaaacgtgattcgaaacaaaatagtatctattgctttccgagttcactttccttgaggtcaactcattgagataccttataaaccctttggaaattttgtggctgccagagtagcaatcaattaagggtcgtcccttgttgataatcgaaaatattaaatttactgtagattagagattgacaggtgacagtaaaaattccctcccaaaattacaaaaaaaaatttcgaattcaacgctttccaatctttcatttggctagctttcaaaactttaatgatcctaataagaggttgtgttcatcttgcaactcatatataacatccaaattgtgtggttttgcaacacaatactacacaaaatctcaaaaaacatcaacgtgttataattttcttcttctttttacaaacatcatcttccgacagcatcaaaatctcccatgggtcaacgtttatccctcaacattgccaccatttctcggcttgaagatttaattcccatctctgcttctgggtcgggtaatgacgatggcgaaggtgaaggtcctcccgatcgttcagaagcacttgctgaagaacaacaaaatacgatacgtttaaaattattaaaggccaatgtagtgtcagctgccacctcacatcacggaaataacattgcgtcaagtgcctcgcccaaaagctttgcatcggctgacaggaggagacgtggcaatgatgccgccttcaaacatgaattgggaagaagaccatcttacagctctgataacatctcacaaccatcatttggagaagaacaaacagcactcattcttgaaaagatgaaaaacattggacccattcaacaatttgtcgaacaattaagtaatgaggaaaaactcttaaaatcatatttggatttcaattggatgacgacagtggcactcatcgagagatcagcatcagagagtatgcggttcttgtcgaaaggaattggcgattttttcaatgtagcaattcatgaaatgcaattgaaaatttctgattcacaagccgatttgacctccatggaatccattcatggccaacaatatgtggaggtcaagcttgcaattgtgccatatattcatttcagtgaaggaagtagctttagtacgataagctttcctgttctcgatcactttcctgtggattctgaggatgaaccttttgtgaacgtgtcaccaagaaccaataacctctctcacaacaatcatcataactcgagtggtggatcttcatcgagtcctctccgcatcaatgtcaccaaaactccatccaaatttaccctagctctgatcgtgggtccatggctcgtatttttcgaccctctcaccagtttgatcattcctaaaaagttgtatggaatggcaaaaatcattgcttcgaatcttcctgaattattcattaccaaacaaaaagaaaaactcactgaaaaacttgcacagtgcattgtgtcatggaatacttccaaattgttcaagaacgaaaaagacatgttttgctcacctcgtcaaaattccacaagctcgccaccgcaacaaagcatgtatggtaatggaattgatttcattgatgattatatgaggaattatttgaatattgattacaccacttttcctctggtgagatatttcaaaacctttttggggaatgctcgacaacaaggttggtctcaaatggtcattgatttggatgagagcttgattggaaaatatggaccagtgttgacaccaaccactccattgtcatgctttgatttttctaaccctaacacgaaacttgcaaatagtaacaatgtaaatcaatttgctcacaaaccacctcatggaggaggaacggccatgtgtactttggtcattgaaagtcatgaagaattggataatatcattaaggacatgatgattcatgatctcatggaaaatgctgcatcgtaccaacaatttgagagaacatcaactccagaaacaccactcggaagtgagccgtcatcattgtgcgcaacctcaaagaaagaaggaaataagatgtctaccactcagcagcaaccaacctttccaacaacaatttcagaatccgataacgtcaccaatatgagaaaaaaggcacctccagtctctcactttttcattgacgttttgaaaatgtttgatcgagcttggtggatgagacacttgttcgacgtgaatgaggaacacgttgaggtttcaactccaagccataagaaacatgtatcaacaaccgtgcaaagctctggtgattctccaagtcaaattcgtcacacacgtgattacattagtgagataggatgcccctttggtcatgcaattccagattatgaaaagaatttagaatgttacccaagacgacgcaaaaagaaactcaaacaacaagtgatcagtagaccaaattcaccttcctcgccgaatacaagcagaagatccataacttcacttagtcctcgaaaatctccatcgattcgatcgaatgcctcccccaaaactccaatacaaccatttccacaaacaagcaatgagagcataccattggatagtttgaatgaaataaagcggtaatatccaagtcagaaaacgtttttcaaaatctattaagcaatcatgtgtattacataagaaaatagccgtgtgtgatattaagagacctcggtatcatctcttactcttctaacgaggaaaaaattgttggtccataataatagttaacattaattaaatttcaaggaagctgaaatagtggagccataaatagatgaagatgaagaattgttcaggtgattcttaattgcctcaaatccatccacgccattaatattcagaaaaatataatagctatctggaaactttgggtttgatattggcttaactaagtgctcgtttttgatatttccattcaaaatgggaacattggacttgagtagtgacaaaaattgcggaatagacaattgatttggaattccagtgattctgacagcttgtatctgttgacgctcctgagagaaggatgagtgactatcaatagagtgttgatcttgagaaatgaaagagcttgtacttgataatgtcgagcaatcactcagtaaatctcgttgagattgtggaagcctgattcctttcgaataatacgaagtttgataacccatatgttggggcactccttgaatggcagacggtggaggaggtggatgataataattcgatgtcgaggggataggtccgtgctcggaagaaagtggttgctgaggatatgtcgaataataattgtgtggtggtacctgttgagagttcatcatgttgctattggctggatcattctgaatgtaatcaatagaatgaattggttgtgaggtaaatttgatagaattagagatatgtccatatgagttggtgaactgtgatgaaggttgttgctgatgaacgactagtgtgggctgtgtttgttgtggcactgtttgttgaactggtggtggttgaaattgttgttgtggtaattcttcgtattgttgagccatttcataattataatcggatgatggtgaaccacggttttgagcataataaggctgatttatggagtcttgctgtaattgtgcaaaataattctcttcttctccatgtgcagtgttgtcaaaggtgttgtgataattattattttgatgatggttattgttgttgttgttataaggatcattttgataatgacttctattgttactacttggatgatggtagtatgaatttgaatgatgatgatgagaatggtatgagcctcgtccaccacgtgtacctcctcctcttcctccccttgatgcataacctcttccaccacgtgtacctcctccacgagtgttgtaagaatgatcatatcctcttcctcctcgtgatgatgatagtgaactcttttcagaattgttattgtacattttttaaacttttgaaaaaaatcttcttaaaaatctaattgtaacaacaatttacttgtaattatttacataacatgcaagtgaatgatcatacaatgaatccattcgaaacatttgcaattctttgttttttttcaatgattttgttatcttggaaaattctctgaactcgttcataagtgacacacactcagagaatgacacacttcattttcttttccgatgatttcggttctggagtgtagctacccaagctcttccctgaatgattggaatttgagataaagcttggagtagttggacttgcatcaatttgtgaatttaaattggaagaaggagcatctgatgtagttctcctccacaagcttggactacttccacctcctccatccaggctactcaattttccatgactgtttgaggttgagagtatgtctttttgatggcaagcattgtcgtcatgacaattgtcaggtggtgcagaaattgaaatattcacttcagaattttgtggtgtatgaacaacttcttctaaaagcttcactcccttatgtattaaaacatatttcgccgttcgttggaaggctttctttacattcagtccagacagagcggaacaatcaaaatgatccaaatcgtattgcttaataaattttgtgaccatatctgctgtcacttgtcgtcgtgaatcctctaaatctgccttatttcctaccactacaattgctggccacgaatcagtatctttcactcttaatatttgttcataaaattccaaaatactttcaaatgattttttatcgtccatcgaatacaccaataaaaaaccatcagcatgtttcatccaactctctcgtagcgatttaaattcttcttgtcctgccgtgtccaggatggaaaaaccacattgttgagaattttcaagttctgtaaatttgtaatatcttgacattgagaaagtggcatgatgcattcccaagaagggttattaatggtaaggaatgacattgtgttgttgaatggtgttggtttcatttcatgattacgagaatcatcgtggccacaatgatttcagttgtcaaaaatttacgaaaatggaaacaaataccaaaggcaacaatgtagaggaaataaatcgaaagattaataagtttgaatgacacccacaacaaaatcattcggatacatacgaatcttcaatggttgggtcataattttcagaaaatgtctcttgagtgaatcgaagtgtcaaacagctttttccgacacctccactatggatatcaaacaatccataacaagtaaaacacatgacagaaggagggttgataatcaagataagaagaagaagtcttacctgccaatcactgcaattttaacctccatagagatattcaagtcagtaagagagacaatttttttaattgttgttgtttgttcatgaaaaaaccatgcaacctgtcaaacatctcccaaaagagatgtaaatagttccccaaccgaaacattctttgattacgcccggggcatctcaagatgaatccacgaatcctcatcaacccctcatgagaacgaccctataaaaatattgaacaggaaagccaggggaaaggacccaacgcacacaaggtgaggaagacccaacacacaaggtgctcaaaaactaattctatgagtagtaaggaatcgaagaagaatatttcttgctgcattgatatctctgtcaaaaattgagccacatgatggacaacgaaacacttcggatgatccaaccgtataaatatgtccacaacatgagcaagttttggatgtgtacgcttcgttgacaatataaatgtgtgtccacggatgctctctagctttgtgaagcaatctttgcttgaatctgtaataaattgtggcttttgctcttttattttagtgctgagcaacttaaaaccgttaaaaaaaacaaaacctccaaaacaaggttattaataaaccttgcgtcatcaggactgtgttttagtgatggtttttgaaagaaattgctgtaattgttcttttggcttcaacggttattcatttttgttgtttttttcatatattactcattcatacgagtattgctctttgatgatttagggatgggagcacaatcaggtaaattgatgatgatgcaatcacgtgcacgcattgttgaaattgatggctcgggatttatggaagaacgtggtggtcatgataatttttccagttaccaactaccacatgaaatattgaatcgtcgtcattgttcaaaacaagaaacaaaacaagatacaaaacaagaggttgatcaacaatcgcccgaaaatgtttataaattttggagaagagtggatcatatttctcggaacggcattcattccaacaatgataataatcagaagaacaacatcatttccgttgtagatttattacaaaatgattatcatcatgcagagcttattgaaaaaactagaattttgcaccatgaggaagaatatgcacacgagcaagatatttgttttcaaatcaagggaatattgagctcatcggaacgatattgggtgttggataattttgtgcacaacaatggtatcaagcttaacgacatttctgatgaatatcctgaagaatacagaaggtgtaaacgagctcttgtcaagtgcagcaaatttgccaatgtgatgtgggatcgaatgaaaccctttctaaaaaagtcagatctgaagaatattaggccatatggctttgataacaatggaacgtggatacctgtgggattgaatgattgttttcgagtgacagaatataaagaaggagattatttcaaaccacatatggatgcacaatttgtgaagaatgacaatgaaaagagtattttgacggttttgatatatttgaactattatggaggtggtggagagactaaattcttcaagctattgtccaaacaaggaacacaactaacattgcgtgaattggcatgtgtacagccgcatgcatgtgactgtttaattttcaatcataatctttatcacagcggagaaaagctcacacatggcaccaaaattatcttgcgaactgaaatcatgtttaaacgaatcgactcggaaagtatattgcgatgcaattatgaaaatttagaagagtatcaaatggtaaaaaagttagtggacgaaagtgaacaattagaaaaacaaggtcttgttaaggaagcgacagaaaagtatttacaatctcaggaaatgcaagtgaattattccaatcagcgattcttggaaagagaaaatcagaaaatgagtgaaatcgagcgattattgcctgaagaaatatttgctacgattttaagctatttaacgcccgcagaaatttgtcgcattgttcttcctctcaactctcgcatacacggttatgctagaaatcaagctctatggaaatcatgttatagcattgagtgggcttgtcacaaccatgatgaagagcaagtatccaagtatttaaacaaagctaccaatgtcatggtcgtgaatgatcaattgccactttcaaacgttgaaacatccatcatgaatgcagaatcaaaaaagagaaccaatgactttgatacagtcgactggtataattgctttattactcgaaagacattggagagggagttttgtgccattctcttcgatcccggtgttttatatagcaagtatggcaaaatgaatgattccaaattttatgttgatagaactgtatgctgtcagccacttaatgcgcagtaagtagttgggttttcatttcaaatgcacttttcatttgactgacatttgacaactcggtaaattaccttctcaaacccttacatatcaaattcacacaatatttagttttaatatttc

SEQ ID NO: 4742 - protein, 359 aa, Naegleria lovaniensis
MGTARWIYNKCLEFTHNFKGVKKNKKNFRTFVVNNDNYQTENQWVVNTPYDVRDAAAIELLTAFNTNFEKKKAGMIDKFMIRFRRKKDRKDHFVLHCKHWKKKSGLYSFIRNIKSAEPLPEELQYDSIIIKNKLNHYYLCIPQVLDIRGENQAPQHSGQVVGLDPGVRTFQTTFDLNGYSTKWGSGGAERIGRLCCAYDKLQSKWSQPEVRHCKRYKYKRAGRRIQQKIRNIVDDLHKKLCLWLCRNYQVILLPSFETQKMVKKLHRRINSKTARKMLTWSHYRFKQRLLHKAREHPWTHIYIVNEAYTSKTCSCCGQIYTVGSSEVFRCPSCGSIFDRDINGARNILLRFLTTHRISF

SEQ ID NO: 4743 - DNA, 5341 bp, Naegleria lovaniensis
  source 1..5341: mol_type = other DNA
tatattcatcagtattaatatatttccaaatatgattttctggaaattcgataagatttaaatcattatttgatccattgtaagacaagcttacaaacaaaatatagccatcaggagacacaccaatcaacaacgtaaaagtgtgcttacactttttacctgagtacaaactttgctcttttatcttgttgcttggtgtaaatatttgttgctctgttccatctaaaataatagtaattaattttccattatatttcacaccacgctcagccctaaattgatagtttttgaatgacaattcttgattgtaatgagtgaaaaacacatcaatcaccttttgcaaatttctgtgaacagtagaccgatctatttcaaagatgaatgctaaaaagtactctgtgggatattgcttgatccacattaagaacatcattaactgagatcgaattgatagttttgatagattttttgggtttcttaccgttctctttgacccacttattccatttatctgtcttcataatatcaccatattggaacaagcatgtaacgcagcaaaagttaagcatttttgtggaatctcgtgacttaattccaattagatctgaacattgaacttggcagcgaagacaatcatactttttttcaacacaagcttgttctttcctttcggcatccttaatagcgactttttgattagtgaaaaattctttcctgatttttgctgacgagaagtgtgaaagcttgcaaaaattgaattcattttcagccaatacaatcttgacgagttgaggagatgtcttacgcttatcaatatgacaatctgtagctggcacacaacacaaaccttgcttgctctgtctttccttcacatatgatggatgttcataatatttctccctttcaaatattaactcagattgagagttggattgagaggcgctagtacttgatgaactatttgcattcaatggttgagatgaatttgatgattgagaattttggagagagtctgaatatattgagtccaattttcttttttgattatttttcaataatggactcgtaatgtttaatataacaagcatgtccagaatctgtttcttgttcatacaagaacatgcataccttattgtgacccaataatttactgataggaatatcattcaaacagaatggacaagtgcgagctgatccgttctcaatggcagcaataacatccttgcgtcgttgttcaaccgaatcgtttgttgttgaattaatggaataaaaaccttgtgacattttttcttgattgtttcaagattccataaaagttacgaaatttattcattccaactgccagcctaacgaaaggacaaaaatgaaacaaacacgaaaaaacatatgatttgatcaaattcgcacatcgattttgcattaatttcccttgtttttgcttgatttcttggttttttcttgttttcctcgaattttcactttttaatgcacagagtcaactagtcctgatgacgcaaagtttattaataaccttgttggttttggaggttttgttttttttaacggttttaagttgctcacattctctttggcagaagcttaagagcaaaagccacaatttattacaaattcaacaagtaaatataatcatcaacagtcagttcctgacgaaccattcattcattctttgaatcaaaagtgttgttattggaggtggataaggaattgtcaaggcgttcacttttccatgatcagttcggacgaaaagaatgaatcaagttattcaaattgatagagtttcaattcaatgagtcattcaatactgatagagtttcaactcttgttgaggttatcaaaaaaaaactcaacaacaaccttaatctcaacgaatgaagagaagtagagaggatgaacctactcatcctcctactcatccatctcttgcacacagtatcattccattctgggatgagtactcacaacaagtatcggataaactttgggcatgttcaagagattcctttcatgagtttaatcagtacaacaacaagggatgcacagacggatggttcaacttttctctaccccaatgaacaagaaaggacaacattgaatcagtggatgggaactgctcgttggatctacaacaagtgtttagaatttacacacaacttcaaaggtgtcaagaaaaataagaagaatttcagaacgtttgtggtgaacaacgataattatcagacagaaaatcagtgggttgtgaatactccttatgacgtaagagatgctgccgctattgaattgttgactgcgttcaacactaattttgaaaagaagaaggctggaatgattgacaagttcatgatccgtttcaggcgaaagaaagacagaaaagatcattttgttctacattgcaagcactggaagaaaaagagtggactgtattcttttataaggaacatcaagagcgcagaacctttgcctgaggagcttcagtacgattccatcattattaagaacaagttgaaccattattatttatgtattccacaagtactggatattaggggtgagaaccaagcccctcaacattcaggacaagttgtaggattggatccaggagtaagaacatttcagaccacctttgatttgaatggttattcaaccaaatggggctcaggaggtgccgaaagaattggtagattgtgttgcgcgtatgacaagttgcaatcgaagtggtctcaaccagaagtcagacattgcaaaagatacaagtacaagagagcaggaagaagaattcaacaaaagattagaaatattgtggatgatctacacaagaaactgtgtttgtggctgtgtcgaaactaccaagtgatcttacttccttcgtttgagactcagaaaatggtaaagaaactccataggagaattaatagcaagacagcaagaaaaatgttgacttggtcacattacagattcaagcaaagattgcttcacaaagctagagagcatccgtggacacacatttatattgtcaacgaagcgtatacatccaaaacttgctcatgttgtggacaaatttatacggttggatcatctgaagtgtttcgttgtccatcatgtggctcaatttttgacagagatatcaatggagcaagaaatattcttcttcgattccttactactcatagaattagtttttgagcaccttgtgtgttgggtcttccccaccttgtgtgcgttgggtcctttcccctggctttcactctttgagtgtttgcttgcaagatcagcactttgttcgatttgtttgttttgttcaaattgttgatttaaataaaggcgttgaccaaaagtcttcatgcctcaatactggcgataatgaagagagaataatcgtaatcgtgtttgtttcaaaaaaaaaattcaaaattaccacaacatcatcatcgtctttgaaaaaagttcattgagcagattttaagagtcatcaaatattgttgggatattgttgaatagacaaaaattaatgggcaaaaatcaaaataccagttccgaagatggcagcgcgtttaatttatcaaaaagagaaagcaagaaatatttaatggctgatacttctttgcaatctattgagctgaacgacgatgagaataccagtggtgggttatatcatcgcatcactaatcagggaaaggattctacggttacaagctcagttggtgcgttttattattgttttgaatgtgtttcctaattaattttcgttgttgtatgatacgaacatgattttggaatgaattgggtcacctcacacagatgacggagtaacctatgaagccatcatggcaaagtacacagtatcacaaaaggcttccgataacatggacaaggatgctatggcctcacaaaaagaccttgatgaaattcatactatggtttattgcaaacccctgaaattcaactggttcttgttcttcctttattatttgttggcagtatgctctcttggattgttgttacttctttccagatggtatgtgtggctgagagatcgaatgattcattgggaatgttcaaatgccgaagctgacattgtgttaatcaaggtatgtttcgacattggtaaaacaaataatttgaaaaaactgtcatttacaacagagtagcactggagcgttgacaacctgtaaagtcaaaaaacatgatttgagttctcattcagtaagtgtttatttgtgaatgaatatttcttatgatttgcacaacagaatgggtcacaagaaacaagtataagaatattcacatatcgttacgtgaaatatatttatgacgttactgaggataaatttaaaagattgcaatttaacacatctctcccatatactactatccataatgaaatgtcttcaggattgtcttcacaaacaagaaaattaagaagaatactttttggaaaaaacttgattgacattccagtgaaaaatattgtttcattgttgttggacgaagtattgcatcctttttacattttccaaattatttctgttattatttggttagctgacgaatattggtcttattcttgctgtattattgtttctgcagtttgttcaatcattttcagtttaattgagaccagaagaaacctgatgaaattaagaaacatggctcactacacgtgtgaactagaacgagtcaacaaagttggaagtactgaaaacgtttcttctgaagagcttgttcctggtgacgtcattgtattaagtgacggcattctcctgccctgtgacgttttgttactgtcaggacaatgcattttgaatgaggctatgttgacaggagaaagtattccagtcgtaaaaacccctttacccaacgaaggaagcgcgaattattctgtggatgctgataaatccaacactctctattctggtactcatattgtacagacccgtaaaatgggagatgagaaagttttgggaatggtttgtagaacaggatttgacacagcaaagggaaaattaatgttgtctatcctctttcccaaaccttcttcattcaaattctatagagactcactcaactttattggtgtcatgtttattattggaatgattggtattctgtactcgatagttaagcttgccctgtcaggagttccatgggacaatattgtgttaagagctttggatgttatcacaattacggtacctcctgcattacctgtggcaatgaccactggtatgtcgttcgcggttgccagacttaaaaaatctaagatcttttgcatttctcctcaaagagttaatgttgcaggtatgatcaaactcatgtgctttga

SEQ ID NO: 4744 - protein, 327 aa, Naegleria lovaniensis; identical to SEQ ID NO: 648

SEQ ID NO: 4745 - protein, 480 aa, Naegleria lovaniensis
MFFGSHKSLYELTKEKGDEKTGTVRVSMYDRNIVSICDKDMLKELLVVKGNNFVKQSRLYEIFNTFGVNILSALDASGETWKNHHKVASGAFASKNLEYMARVASKSVDLCRSSKWDKLIRDSPTKSFVLDANGDFSDITLDVLGKAGFGLDFSIFDELNPEGKIFRRALETMFTKGIIAKRFVGLNPVLSWAYPLVCKVLGIDQAVSIVSNKLDEIIKDRTQEVEKRGLEDDGNDTTAEELEDRKDLLSVLVEANFIQKGILTDAELKSDAYIFSLAGHETTSTTLQWVCYELSKRPEVQKKAREEVDTILGKGTNARAPDYNDYPIMNYVNAVIMEALRLHPPVTNVFRVAKKTTTIGNITIPKDTNVLINIFSANRSENNWEKPLEFIPERYPLNADEQLKIQHDFTWIPFSMGNRKCIGFKFAQIEAFVILCRILQFYELELGNDESNPNDQIHDVPGVTVRPGNLKVIMKPRQDL

SEQ ID NO: 4746 - DNA, 5515 bp, Naegleria lovaniensis
  source 1..5515: mol_type = other DNA
gaaagggtatggagtttgtttgatttggtgctgaaatctttcaatctcatgaatgatgacatgcattctctcgattttttgccaattcacaagaatggtctcttcctcgttttctactacaaatggctcttctttttgactttctcgcaacagtatcaaatagggcgtgctgtccagttcgtttagaaagcctgttcaacaagacacaattgaaacttacaagtatggaatacatggcgaattgataaggtgagctgtattcatcttaaattcagtggaggccagtccttgaaatttgttcaacaatgcttggtcagttagtggtctttgattcaagcttattgaaagcccttgaacaagtgcaaaaaacgtggagtaatttttaaacttgtttaaaaactgaaacagtcccttgatcgtccatcaaccccgttcaacaaagtacttacttgtgaaattaacatcaatttttcaaaagccttgtcgtccattccagcttgtgtacaagtacatgaagctgcccaattccgtatccgtttgtaacgattagaaatggcacgtatggaaggagaggtatcgatgaaatacaattcctggggctaaaccaaatgaagatgcttgtaacgaatagtcatgtacttactttcatttgacaaagaatgagctcgtcctgaaggcatagctgtcttgcaagatcacattcgttaatgtcccagaaggaacagttgtaatcattcactatttgaatttctggagcatagaacataacttgggtattaaaagagatgggaaataagccatgcaccatcatcattaaggtatgtgaagaggtcttttctatgatccctgttttttctaagacaaaaagcaatctgtccaactttccttgtatgcatgtatcattggacacatcggagtgctctttaatccataagaacaactttcgttccaaatgtatggctttctcaaaatgaaacgagagaaaatccacaaaactcgcgtttgaaatgaacagatggctcgaggcaatgaagcacctcataaactcttcgttccgagtgtgcagaaatgcttccagaagctcattcagcgagatgccttcgaaagacaatagggtggtcccatcatcagaaaacactgaaggatttttcgttgaagttgtaagaattgcgtccaagacaggttcaatttctgaagcaatgaatgaaagtttaccgtcgtttgatgctcccgactcctcctcaatgctcctcgctgaaagcctcagtcctaactctttgagactgcctatcatgaattgtaaaacagtctcttggttgaatgtttgtttattgcccgattcggtttcagtgttcgtgtcgtgcatatcctccaacttcatagtgctatgggcggaagcatcgtcttcagttggctcaatcatttttaaaaagctgttttcatctctcacgaccgttgaagccaaatgaacaattacagcaatttctttcaaaaagcatcactaaaacacagtcctgatgacgcaaggtttattaataaccttgtttgttttggaggttttgtttttattaacggttttaagttgctcagcactaaaataaaagagcaaaagccacaatttattacaaattcaacaagtaaatataatcatcaacagtcagttcctgacgaaccattcattcattctttgaatcaaaagtgttgttttggaggtggataaggaattgtcaaggcgttcacttttccatgatcagttccgacgaaaagaatgaatcaagttattcaaattgatagagtttcaattcaatgagtccttcaatactgatagagtttcaactcttgttgaggttatcaaaaaaaaactcaacaacaaccttaatctcaaacaatgaagagaagtagagaggatgaacctactcatcctcctactaatccatctcttgcacacggcatcattccattctgggatgagtactcacaacaagtatcggatgaactttgggcatgttcaagagattcctttcatgagtttaatcagtacaacaacaagggatgcactgacggatggttcaacttttctcaattcactgtgattgaatccaagccagtgtttgatgttccactcaatgttcatcactctataacagagaatgtggcttttgataactctaaaaagccacctcagctcaagaaagcaaaaaagaatcaaaaggtggcccaaaaatttcaagcagacaaatccttgaaaatccgactctaccccaatgaacaagaaaggacaacattgaatcagtggatgggaactgctcgttggatctacaacaagtgtttagaattcaccaacaaatccaaaggtgtcaagaaaaataagaagaatttcagaacgtttgtgaacaacgataattatcagacagaaaatcagtgggttgtgaatactccttatgacgtaagagatgctgccgctattgaattgttgactgcgttcaaaacgaacttcgaaaagaagaaggctggaacgattgacaagttcatgatccgttttaggcgaaagaaagacagaaaagatcattttgttctccactgcaagcactggaagaaaaagaacggactgtattcttttattaggaacatcaagagtgccgaacctttgcctgtggagcttcagtacgattccatcattattaagaacaagttgaaccattattatttatgtattccacaagtactggatattaggggtgagaaccaagcccctcaacattcaggacaagttgtagcattggatccaggagtaagaacatttcagaccacctttgatttgaatggttattcaaccaaaatggggctcaggaggtgccgaaagaattggtagattgtgttgcgcgtatgacaagttacaatcgaagtggtctcaaccagaagtcagacattgccaaagatacaagtacaagagagcaggaagaagaattcaacaaaagattagaaatatcgtggatgatctacacaagaaactgtgtttgtggttgtgtcgaaactaccaagtgatcttacttccttcgtttgagactcagaaaatggtaaagaaactccataggagaattaatagcaagacagcaagaaaaatgttgacttggtcacattacagattcaagcaaagattgcttcactaagctagagagcatccgtggacacacatttatattgtcaacgaagcgtatacatccaaaacttgctcatgttgtggacatgtttatacggttggatcatccgaagtgtttcgttgtccatcatgtggctcaatttttgacagagatatcaatgcagcaagaaatattcttcttcgattccttactactcatagaattagtttttgagcaccttgtgtgttgggtcttccccaccttgtgtgcgttgggtcctttcccctggctttcactctttgagtgtttgcttgcaagatcagcactttgttcgatttgtttgttttgttcaaaatgttgatttaaataaaggcgtgttgattgcccaaagtataaagctgcatcgaaaccttaatgaatagcatcaccctaatatgcaaatgaacaaacctaaaaagggggaaccagcggaaggtgcaagatatcttccttttcgttggacacaacaagttcatgcagtcaaatggtctttaccagatacaccgaaatgacaatgctcgcgtgtgcggcacaaacacgagcgctatcatttccaaaatggttgagctgaacgaaggagaaaaaaaatgcgatttgctgaaaatctccatcatggttgtcgtgccgaaaatcatcatcatttaaattggacaggtcctatcgagtttcaacaagtcaaaacaaaattcaaaacataatactgtgaatcaaattattcgattgaacaacatgcttgaagttgcatatgccttcaccgccatctcacttgcggttgtagcctttttcattctatccatctttaacaattatctcaaagttaaacatatcaaaggatcctggcagttttttgtcactctcttccgctacccaatcatctctcaacacatgttctttggatctcacaaatccctttatgaattgaccaaggaaaagggtgatgaaaaaaccggaactgttcgagtttccatgtatgaccgaaatattgtttccatttgcgacaaggatatgttaaaagaattactggttgtcaagggaaacaatttcgtcaagcaaagcagactctatgaaattttcaatacctttggtgtcaacattctcagtgcattggatgctagcggagaaacttggaagaatcatcacaaagttgcttcaggagcttttgcaagcaagaatttagaatatatggctagagtggcctcaaagagtgttgatttatgccgctcatcaaaatgggataaattaattcgtgattctccaactaagagctttgttttggatgccaatggagacttttcagatattactttggacgttcttggtaaagctggatttggacttgatttttcaattttcgatgaattgaatccagaaggaaagatattcagacgagctttggaaaccatgtttaccaaaggtattattgccaaacgttttgttggtttgaatccagtcttgtcttgggcttacccattggtgtgcaaagtattaggcattgatcaagcagtatcaattgtgagcaacaagctcgatgaaatcatcaaggaccgaacacaagaagtggagaagagaggtctcgaggacgacggaaacgacactactgccgaggaattggaagacagaaaagatttattgagcgttttggtcgaagcaaactttattcagaaaggaattttaaccgatgctgaattgaaatctgatgcttatattttctctttggctggacatgaaaccacttccacaacacttcaatgggtatgctacgagttatcaaagagacctgaagttcaaaagaaggcaagagaagaagtggatactattttgggtaaaggcacaaacgccagagctcccgattataacgactatccgatcatgaattatgtcaacgcagttattatggaagcattgagacttcatcctccagtgactaatgtattccgtgttgctaaaaagacaaccaccattggaaatattaccattccaaaggataccaatgtgctgatcaatattttcagtgcgaaccgatctgagaataattgggagaaaccactcgagttcattccagaacgttatccattgaatgctgatgaacaattgaagattcaacacgattttacatggattcccttctcaatgggtaatagaaaatgcattggatttaaatttgctcaaattgaagcctttgtcattttgtgtagaattttgcaattctatgaattggagttgggaaatgatgaatcgaatccaaacgatcaaatccatgatgttcctggtgttactgttaggccaggtaatttgaaggtgattatgaaaccaagacaggatttgtaaatatctca

SEQ ID NO: 4747 - protein, 385 aa, Naegleria lovaniensis; identical to SEQ ID NO: 646

SEQ ID NO: 4748 - protein, 392 aa, Naegleria lovaniensis
MQQDQSSSIPSNGTNNTTSTGTDIGQGAVLIKTNPYECGLLKTQVRGYDFNNDLKDVSKPINYDGLFESFYTTGFQAHNFGQAVNIVNDMLHWRLSDEPMTQDEQEPYDDPTVRAQTKCRIFLGYTSNMVSSGVREVIRFLVQHKLVDCIVTTCGAIEEDIMKCMKPTYLGAFDLDGKHLRLNGINRIGNLLIPNLNYCEFEDWITPILDEMLKEQKAGTLWSPSLMIDRFGKEINNEESILYWAHKNEIPIFCPALTDGSIGDMLYFHSYTDKDGNGLVCDIVSDIRRLNGLAVRSKKTGMIILGGGVIKHHICNANLMRNGADFTVYINTGQEFDGSDAGARCDEAVSWGKIRLGSKYTKIYGESSIIVPLLVAQTFVKYQREQQEKAKQ

SEQ ID NO: 4749 - DNA, 5515 bp, Naegleria lovaniensis
  source 1..5515: mol_type = other DNA
tgaatgataaagaatttgtagggaagcatattgaaaagtatggccacggactgatctatgcatcaccgtatttacaacaagacaggaattttgtgttgcaagtagttccattcgctggggcagaattagctgttacaagtgattatattcgtaatgatcgagaagtagtattgaaagcgacaaagaatgactttcacgcttttgattttgctggagtaaaacttcaaaacgacaggcagtttgttttggaagcagttcaacagaatggtattgttctttggaatgctggaccatttaagaaagacagagatgttattttgactgctgtgaaacaaaatggtgaagtgttggaatgtgctttcatagatcgagttgaagtggatgaagaaataatttcagaggcaatcaaacaaaataagaatgcacttcgatggatatccaaagataagctcaaaaatgtttatttcatgcagaaagctctacagttaatatacccagagctcgatagttttgattattcaaacaaagaaaccatgaggaaggttattggagaatttggatttttacttgaatttgcaaacgatgatctcagaaatgataagagtattgtggcgactgcagttcgaaatgatggttattctttgcaatttgcatcagatcatttgaggaatgacaaagaaattgccttactcgctgttacacaagatggctttgcattgcaatttgtctccacagcactgaagaaggacaaagatgtagcattagcagctgtaaaacaaaacggattttcccttctgcatgttcatgacgagttgaaaaacgacatggacattgttttgacagcaatccaacaaaacggtggttctttccagtactgtaatgagaggatgaaaagggatcaagaaattgtatttcaagccatccaatccagtcccagtgcttttgttttcgcatcaaaagaattgtttcatgacaaacaattcttattgaagatcatcaagcttggatgtagaaacattcttagacatgcaccatcagagatttccaatgatagagaatttgtgttaaaagcagtcaaagaaaatagtcttggagtattcggatacacgcgttctgattgtcccgatagggaaatcatgttagaagcagtgaagaataatggctatgcattgaaatatgccagtccaacactacgacaagatgcagaacttgtgagggaagcactcaaatgcaatggttacgtgttaaagtacagtgacgagttgtaccaaacacgaatggaacattgctatcataatgtgtatttgggatttcagtaatttggattttggccatgtagctccttgtggaacacagaacttgcactcgtgttaaggcaagacgaaaaagtatgaatgccataactaaaaaattagtgcaaattccacaaggcacactcgagtgtgtctctgaccgttgaagccaaatgaacaattacagcaatttctttcaaaaaccatcactaaaacacagtcctgatgacgcaaggtttattaataaccttgtttgttttggaggttttgtttttattaacggttttaagttgctcagcactaaaataacagagcaaaagccacaatttattacaaattcaacaagtcaatataatcatcaacagtcagttcctgacgaaccattcattcattctttgaatcaaaagtgttgttttggaggtggataaggaattgtcaaggcgttcacttttccatgatcagttccgacgaaaagaatgaatcaagttattcaaattgatagagtttcaattcaatgagcccttcaatactgatagagtttcaactcttgatgaggttatcaaaaaaaaactcaacaacaaccttaatctcaaacaatgaagagaagtagagaggatgaacctactcatcctcctactaatccatctcttgcacacggcatcattccattctgggatgagtactcacaacaagtatcggatgaactttgggcatgttcaagagattcctttcatgagtttaatcagtacaacaacaagggatgcactgacggatggttcaacttttctcaattcactgtgattgaatccaagccagtgtttgatgttccactcaatgttcaccactccataacagagaatgtggcttttgataactctaaaaagccacctcagctcaagaaagcaaaaaagaatcaaaaggtggcccaaaaatttcaagcagacaaatccttgaaaatccgactctaccccaatgaacaagaaaggacaacattgaatcagtggatgggaactgctcgttggatctacaacaagtgcttagaatttacacacaacttcaaagatgtcaagaaaaacaagaagaatttcagaacgtttgtggtgaacaacgataattatcagacagaaaatcagtgggttgtgaatactccttatgacgtaagagatgctgccgctattgaattgttgactgcgttcaacactaattttgaaaagaagaaggctggaatgattgacaagttcatgatccgtttcaggcgaaagaaagacagaaaagatcattttgttctccactgcaagcactggaagaaaaagagtggactgtattcttttataaggaacatcaagagtgccgaacctttgcctgaggagcttcagtacgattccatcattattaagaacaagttgaaccattattatttatgtatcccacaagtactggatattaggggtgagaaccaagcccctcaacattcaggacaagttgtagcattggatccaggagtaagaacatttcagaccacctttgatttgaatggttattcaaccaaatggggctcaggaggtgccgaaagaattggtagattgtgttgcgcgtatgataagttgcaatcgaagtggtctcaaccagaagtcagacattgcaaaagatacaagtacaagagagcaggaagaagaattcaacaaaagattagaaatattgtggatgatcttcacaagaactgtgtttgtggctgtgtcgaaactaccaagtgatcttacttccttcgtttgagactcagaaaatggtaaagaaactccataggagaattaatagcaagacagcaagaaaaatgttgacttggtcacattacagattcaagcaaagattgcttcacaaagctagagagcatccgtggacacacatttatattgtcaacgaagcgtacacatccaaaacttgctcatgttgtggacatgtttatacggttggatcatctgaagtgtttcgttgtccatcatgtggctcaatttttgacagagatatcaatggagcaagaaatattcttcttcgattccttactactcatagaattagtttttgagcaccttgtgtgttgggtcttcccaccttgtgtgcgttgggtcctttcccctggctttcactctttgagtgtttgcttgcaagatcagcactttgttcgatttgtttgttttgttcaaaatgttgatttaaataaaggcgttagttatgaaccaattccaagtcctaccacacaagtgcttctgccagtgattcaatgactcacattcaccaaaaaaatgcaacaagatcaatcttcatccattccatccaacggaacgaataacaccaccagtactggtacagatattggacagggagctgtgctcatcaagaccaatccatatgaatgtggacttttaaagactcaagtccgaggctatgatttcaataatgatttgaaagatgtatccaagccaattaattatgatggactctttgaatcgttttataccactggatttcaggctcataatttcggacaagcagtgaatatcgtgaatgatatgttgcattggagattgagtgatgaacccatgacgcaggatgaacaggagccctatgatgatccgacagtgagagctcaaacaaaatgtagaattttcctcggatacacatccaatatggtttcaagtggtgttagagaagtgattagattccttgtacaacacaaattagtggattgcattgttactacatgtggtgctattgaggaagatatcatgaaatgtatgaaaccaacttatttgggagcctttgatttagatggtaaacatttgagattgaatggtatcaacagaattggtaacttgttaattccaaatctaaattattgtgaatttgaagactggattactccaattttggatgaaatgctgaaagaacaaaaggctggtacattgtggtctccatctttaatgattgacagatttggaaaagagattaacaatgaagaatccattctctattgggctcacaagaatgaaatcccaattttctgtccagctctcactgatggctccattggtgacatgctctatttccattcatatactgacaaggatggtaatggactcgtttgtgacattgtcagcgatattagacgattgaatggtcttgcagtgagatccaagaagactggtatgatcattcttggaggaggtgttatcaagcatcatatttgcaatgctaatttgatgagaaacggagctgattttactgtttacatcaataccggtcaagaattcgacggaagtgatgctggagcaagatgtgacgaggctgtgagttggggaaaaattcgacttggatccaaatacactaaaatctatggagagtcttctatcattgtcccacttcttgtagctcagaccttcgtcaagtatcaacgagagcagcaagaaaaggcgaaacaataaaccaccttcttctttattggaaagcataggttgggtgaacagcttgcccaaacatgactgccatgtcgggacatattgtgaacatttacaacgtctcaaacaagccaggcaataaattttccaacaagttcaattacatcttttcagcagtcatgatgcccttgtacgaacaaattgtgccaatcaatggattggaaatattcacttccacataccatgatctcgaattcacacagacagattttcctgaaggatccaaggctaacattgctggcacaggtacattgaagaaccacattttccgaaaagaatgttcaaatccaataatatgttgttcttgctgctgtatttcgtctgatttgttgcttgttgcattttgatcaatttcttctgttaattttccataaattggatttaatttaaatccaaatgcaaatggtccaaaagactctaccacataggactcgtcactctcattcctactcttccaaatctcccattttgaattcatctctcgcccatcgaactttctcttccaaacaccttgttcctcatcgactgtcactgtgacttcagctccttttaaattctctttaggtaatcctccaattttagccaataatcgattgaaccaattattgccatgagtcactaccaaatggccccgagcaattaaaggtctgtaataattgtggtgctccacatgttgacctgtatgaaatttcatgaaatattctggaagag

SEQ ID NO: 4750 - protein, 386 aa, Naegleria lovaniensis
MSQTKPSAASTITQAQTIVDTQTVEFDKDFISKMENAPHVSEVSIDAMVLLKMMNHCTEKVPIQVAGQLLGLDNGGVLEITNCFPFPSYSDNLTEEERSDQDEKYQIEMLQGLSDVNVDNNTVGWYQSTYMDSFMNATTIANQYQYQRTLGNKRCIHLVFDPLRTRRGELFIKAYRLSDKFIDAVKMAYLQQNELSTMKKKYDIKNKNKKEDIEVLTEKANLPESIEKIQLTQEILAKLNLSDKDIFDELPIQIHNYALVQAFLLDFENDEPSHLLAGYDSLDMANTQFLTRGLESLIEYADGLSHENHRYQTYQKKLAQQKQYVAKKKDRTQEEQEFMLKSVQQPDQLNYLMIANQLGNACDQMRAFSSQSLNLSKIAEIAMKKE

SEQ ID NO: 4751 - protein, 487 aa, Naegleria lovaniensis
MQQLKDLLQSEFSSTTSSEQQSSNNQTGGSVPSTTIPLSVQDYLNQTAAKKEIGFMDLCLSDKQKLAQILRALDDSNQEASKYKQLYQDEMKKNEELTLKNQQQQDLFEKESNDLKTKYNTSAAKLKRLKEKSDEIIEKLAKEREREQQERASETNYLREENKRMLERIGNLQKDKLRLERLVEELEINRMSLILQKKEKKDASIQTEEPTKPEPIQTLTVATNTSNLILNTEPQPSPLLNKSIRDHASIQELNYRSSSPTSKKDKPPLPTVDVKRKKSKKTAASNPVPKEVEEYHEVMNRVRERRILSQNFVDASSSEEQRRSPLLNYLTTPKKNPITNKNIGSRRIDRTIDDSDLLNIVQKSEKAKKEESPHKSTANTMRHLLVFADTTSSSTDRLPEPAHPPPQPEKLPEREEKHYSFSESFISETSFTSDSDGEVYDEDSLMNVVKILEEQQNLVNRSLSSSTLSSSYQFTDTSMEGKSWFEK

SEQ ID NO: 4752 - DNA, 5545 bp, Naegleria lovaniensis
  source 1..5545: mol_type = other DNA
cggcgattcatcatcatttttgtttgatgaaataaaatattattattttgttgacatttctatcagctgtgtactgtgattttattaatcttatcattaaacgtattttcattgctttgacaagcttcaaccgatggtttggcaactattatatttatatatttattaaagaatttcctcctcttcaatgccagtatggagtttttgatgattgaacaaaaaaatgagtcaaacaaagccatcagccgcttcaacaattacccaagcacaaaccattgtcgatacacaaactgtagagttcgacaaggattttatcagcaagatggagaatgctcctcacgtaagcgaggttagcattgatgccatggttttgctcaagatgatgaatcactgtaccgaaaaggttcctattcaagttgctggtcaacttttaggattagataatggtggtgtgttggaaattacgaattgtttcccattcccatcatatagtgatagtatgtttttatattattattttttaatttattcttcacaatcatcatgatgttctccacaattcatttattccgtgttacgtaatcatcatcattttgacactacctactctcatcttgatacatactcacactaccgaacgaattaacagacttgactgaggaggaaagaagcgatcaagatgaaaaatatcaaattgaaatgttgcaaggtctttccgatgtgaatgttgacaacaacactgtcggatggtatcaatctacatatatggatagttttatgaatgctacaacaattgccaaccaatatcaatatcaaagaactcttggaaataagcgatgcattcacttggtttttgatccattgagaacaagacgtggcgagttattcatcaaggcatatcgtctttctgacaaatttattgatgctgttaaaatggcttatttgcaacaaaatgagctttccacaatgaaaaagaaatatgacatcaagaataagaacaagaaggaagatattgaagtgctcactgaaaaagccaacttaccagagtccattgaaaaaattcaactcacacaagagattttggctaaattgaatctttctgataaggatattttcgatgagcttcccattcaaattcacaattatgccttggtacaagctttccttttagattttgaaaatgatgaaccttctcatctcttggctggttatgatagtttggatatggccaatactcaattcttgacacgtggattggagagccttattgaatatgccgatggtttgtcacacgaaaatcatcgttatcagacctatcaaaagaaattggctcaacaaaagcaatacgtagccaagaagaaggacagaacacaagaagagcaagaatttatgctcaagtctgttcaacaaccagaccaattgaattatttgatgattgccaaccagttgggtaatgcttgtgaccaaatgcgagccttctcttctcaatctcttaatctgagcaaaattgctgaaattgcaatgaaaaaagaataaatgattattttcttcacaagcttgtttgttttggaggttttgttataataagcggttttaaattgctcagcactaaaataaaagaacaaaagccacaatttactacaaactcaacaagtcaatataatcatcaacattcagttcttgacgaaccttttattcattatttgaatcaaaagtatcttttgggggtggaaaaggcgttcacttttccatgatcagttcgacgaaaagaatgaatcaagttattcaaattgatagagtttcaattaaatgagtcattcaatactgatagagtttcaactcttgttgaggttttcaaaaaaaaaactcaacaaccttaatctcaacgaatgaagagaagtagagaggatgaacccactcatcctcctactaatccatctcttgcacacaacatccttccattctgggatgagtattcacaacaagtatcggataaactttgggcatgttcaagagattcctttcatgattttaatcagtacaacaacaagggatggatggttcaacttttctcaattcactgtcattaaatccaagccagtgcttgatgttccactcaatgttcaccactctattacagcgaatgtggcttttgataactctaaaaagccacctcagctccagaaggcaaagaagaatcaaaggcggcccaaaaattgcaagctgataaatccatgaaaattcgactctaccccaatgaacaagaaaggaaaactttgaatcagtggatgggaactgttcgttggatgtacaacaagtgcttagaattctccaacaattccaaagatgtcaagaaaaaccagaagaatttcagcacgttcgtggtgaacaataataattatcagagagaaaatcagtgggtagtaaatactccttatgacgtaagagatgctgccttatattctttttcttttcaaagttggttttgaacgcagtcaacaattcagatagactgcattctaacccaactttgaaaagaaagaatggaatgattgacaagttcatgatccatttcaagagaaagaaagacagaaaagatcatttcattctccgttgcaatcactggaaaaaaagaatggacaatattcattcataaggaagatcaagagcgccgaacctttgcctgtgaagcttcagtttgattccgtcattattaagaacaagttgaacgaatattatttatatattccacaagtactggatattaggggtgagaaccaagcccctcattattcaggataagttgaagcattggatccaggaggtagagcatttcagaccacctttgatttgaatggatattcaaccaaatggggctcaggaggtgccgaaagaattggtagattatgttgcgtgtatgacaagttacaatcgaaatggtctcaatcagaagtcagacattgcaaaagatacaagtacaagagagcaggaagaagaattcaacaaaagattagaaatattgtggatgatctacacaagaaactgtgtttgtggctgtgtcgaaactaccaagtgatcttacttccttcgtttgagactcagaaaatggtaaagaacctccataggagaattaatagcaagacagcaagaaaaatgttgacttggtcacattacagattcaagcaaagactgcttcacaaagctagagagcatctgtggacacacatttatattgtcaacgaagcgtatacatccaaaacttgctcatgttgtggacatatttatacagttggatcatcctaagtgtttcgttgtccatcatgtggctcaatttttgacagagatatcaatggagcaagaaatattcttcttcgattccttactactcatagaattagtttttgagcaccttgtgtgttgggtcttccccaccttgtgtgcgttgggtcctttcccctggctttcactcattgagtgtttgcttgcaagatcagcgctttgttcgatttgtttgttttgttcaaattgttgatttaaataaaggcgactagcattcccgccaagaacaaacaattttcaccgtttagtaaaaaatgcaacaactcaaagacttgctgcaaagcgagttttcttctacaacatcatcggagcaacagtcttccaataatcaaactggagggtctgttccttcaaccacaattccactttcagtacaagattatttgaatcagacagctgccaagaaggaaattggatttatggatttatgtttatcagacaaacaaaaattggcacaaatacttcgagcattggacgacagtaatcaggaggcatccaagtacaagcaattatatcaagatgaaatgaaaaagaacgaagaattgacgttgaaaaatcaacaacaacaagatttgttcgagaaggaatcgaacgatcttaaaacgaaatacaacacaagtgcagccaaactcaaaaggctgaaagagaaaagtgatgaaatcattgaaaaactggctaaggagagagaacgagaacagcaagaacgtgcctccgaaactaattatttgcgagaggaaaacaagcgaatgcttgaaagaataggaaatttacaaaaagataaattgagacttgagcgacttgtggaggaattagaaattaatcgaatgtcactaattctacaaaagaaggaaaagaaggacgcctccattcaaacagaggagccaaccaaaccagaaccgatccagaccctgacagtggcaacaaacacatccaatctgattttaaatactgagccacaaccatctcctttgctcaacaagtctatacgggatcatgcaagcatccaagagcttaattatcgatcatcatcgcccacatcgaaaaaagacaagccaccgttaccaactgttgacgtaaaacgaaaaaagtcgaaaaaaacagctgcaagtaaccctgtgccaaaagaagttgaggaatatcatgaagtaatgaaccgagtgagagaaagaagaattttgtcacaaaatttcgttgacgcttcctcttcagaagaacaaaggcgttctcctctcttgaactatcttaccactcctaagaaaaaccctattacaaacaaaaacataggctccagaagaattgacaggactattgatgactctgatttgttaaacattgttcaaaaatcagagaaagcaaagaaagaggagagccctcacaaatcaactgcaaacaccatgcgacatttacttgtttttgcggatacaacatcctcaagcacagatcgactccctgaaccagctcatccacctcctcaacctgaaaagcttccagaacgagaagagaagcattactctttctctgagtcatttatttctgaaacatctttcacttcagactctgacggagaggtttatgacgaagattcattgatgaatgtggtgaaaattcttgaggagcaacaaaatttggtcaatcggtcactctcttcatcgacgttatcgtcatcgtaccagttcacagacacttcaatggaaggaaaatcatggtttgaaaaataagttattacaagttaaatttaagctttatttcgtcaatgggatccatgtcaagatgctcaacatcaatatcttcaggattgacctcatcttccaagattacttcatcaacagggaacgaacaatcgttggttggtaaaggcttctcgaccataatgctttcattatttgcttcaaattgagaatagttttcttggatttccgattcatgtgaatccacttctgtgaaaagcaccgattgattaacatatgaatttagatcatctagctttgaatattggcgtttttctttcttcttgtctctttgaacgagcttggcaacatatagacccactagaaagcttccaatgagtgtaatgaccaccacttgtattacatttgaaatgattgaaattatcgaaaatatatgtgccccattcgcatgcttagccacacaacttgtttctcttgccaccacaacaatgccataaatactccaaccagatctcaaa

SEQ ID NO: 4753 - protein, 335 aa, Naegleria lovaniensis
MSSSSSIRNYLSSRTAARAQAIIQHIMPLILENVRKEDGTLSTESPSLYDISEKLQLIFPPHNYQEEEIFTSPKKLLPTAFSKFEFDLFLKTLVDAINNGKIDHSNLTVMDLCGKVYDINNNILMIALPKLSFLKEINLSNVQLNDDIIVGICTKIPQIERVKLENTAITDNGCIGMIKSLPSPQNVKHLNLSKTKVTENSMKYLADLYSALENHLEKLEIEGIDVSRWTVTRLFNNCRKLCKIEKGHEGSFVIFRNNVILLVPSNPNAHSYTLRLDHPLLDERILRNILGVYKNVNHLHLKSDQLTNHNVSNSIRLSNIKTLQSFTLNDQSFKV

SEQ ID NO: 4754 - protein, 392 aa, Naegleria lovaniensis
MKPSSNPQTLKSKTFISRLVLVFILLEVLPLFNFSFFFFSSRSTSSTLNPLFFIHAMTLKVSVQGGQIVMDSREFPFMASLQYQPSPQRDPYHRCGGTIIAKRWILTAGHCVVLSGQVIPSNKLSVMVGSYRLSTCSLEGFMDGVSSSPGSSLTSNRESMERTTTATTTGRTTQFRFWNCIRARVKHIHVHPRYSDAFAANDIALLELHEDLPWTSTIQPIALTLKRPSFETQHFVLGWGYYSGANRVSDFLRKGMVPIVPDSACNELRLGMSTSRGQTCAGAGEGVDTCAGDSGGPLLFIQHGIYTQTGLTSYGPDKCGVQESYTNRGVYTSVDFHQQWIMSLTNLTSFGNFTKADLQLFGEAWSRHQLTFSQWSVIGGVTLLLLCMILAA

SEQ ID NO: 4755 - DNA, 4662 bp, Naegleria lovaniensis
  source 1..4662: mol_type = other DNA
atttctctaaattaatgcaattttctaattgaggatctatttctgaaatcttattgtttgatagcaacaattcctgtagatttacaagctctttcaatggtggaaatttcgttaaattattgcaactcaagtttagttttcgcagactttgcgtgaatatacatcttcccaagattctcaccacatgattagaaaatccttcaagataattacgagaagcataaaattcaacgagtattgcttcttgattggcctcctttcctaaatgctcaatttcatattgattgttatcatcacaaagatcttgtaggtaagtcccactcaagtcccaactcatctcattttccgtaaaatatttctgaacgattttgaacgtattccgaacgtgtcgttgatgaataccttcttcatccttcttcttggtgttggttggaaattctgtgatgatgtcgtctctctttaaactcatttttttcatcttttccaaacattcaataagatactaaaacactctctgattgccgttcaaaacgcttattattggatcaagctcggaatgaattgggaatgtatttgacattaagaatttgaaacacaaaagcaaacaagttcttaaaaaaatgtcttcatcgtcttccatcaggaattatctttcttcccgaacggctgcaagagctcaagcaatcatccagcatatcatgcgtaagtgtacaattattcatcatcatcaattgttggatcgctcaagcaatttcttatttcatttagctttgatccttgaaaatgttcggaaagaagatggaacactatcaacggaatcaccatcgctatatgacatttctgaaaaattacaattgatttttcctcctcataattatcaggaagaggaaatatttacctctccaaagaaattactcccgactgcattttcaaaatttgaatttgatttattcttgaagactttggtagatgccattaataatggtaaaatagatcattctaatttaactgtaatggatttatgtggaaaggtttatgatattaacaataatattctgatgattgctcttccaaaactctcgttcttgaaagaaatcaatcttagcaatgtacaattaaatgatgatatcattgtgggaatttgtactaaaattccacaaattgaacggtaagcatttcacgagaatatttagttgtacgacattaatagagtaaaactagaaaatacagcaattactgacaatggatgtattggaatgatcaagtcgttgccaagtcctcaaaacgtgaagcacttaaatttatcaaaaacaaaggtaactgaaaactccatgaaatatttggctgatctttattcagctcttgagaatcatttagaaaaattagaaattgaaggcattgacgtcagccgatggactgtcaccagattatttaataattgtagaaaattatgtaaaattgagaagggccatgaagggtcatttgtgatttttagaaacaatgtcatactgctagtgccatcaaatccaaacgcacacagctatacgttacgactcgatcatccattgctcgatgaaagaattttgcgtaatattttgggtgtctacaaaaacgtgaaccatttacatttgaaaagtgaccagctcaccaaccacaacgtgtctaactcgatacgactctccaacatcaaaacacttcaatctttcacgctcaacgatcaatcttttaaggtttaactgggaccttcacggattggaatcctattgtattaaacccttcttgaatggtttaaacaaccgttgaagccaaaagaataattccagcaaattctttcaaaaaccatcactaaaacacagtcctgatgacgctgctttattactaaccttgtttgttttggaggttttgttataataaacggtttttaattgctctgcgctaaaataaaagaacaaaagccacaatttattacaaactcaacatgtcaatataatcatcaacagtcagttccaagaattggtagattgtgttgcgcgtatgacaagttgcaatcgaagtggtctcaaccagaagtcagacattgcaaaagatacaagtacaagagagcaggaagaagaattcaacaaaagattagaaatattgtggatgatctacacaagaaactgtgtttgtggttgtgtcgaaactaccaagtgatcttacttccttcgtttgagactcagaaaatggtaaagaaactccataggagaattaacagcaagactgcaagaaaaatgttgacttggtcacattacagattcaagcaaagattgcttcacaaagctagagagcatccgtggacacacatttatattgtcaacgaagcgtatacatccaaaacttgctcatgttgtggacatattcatacggttggatcatctgaagtgtttcgttgtccatcatgtggctcaatttttgacagagatatcaatggagcaagaaatattcttcttcgattccttactacacatagagttagtttttgagcaccttgtgtgttgggtcttccccaccttgtgtgcgttgggtcctttcccctggctttcgctctttgagtgtttgcttgcaagatcagcactttgttcgatttgtttgttttgttcaaattgttgatttaaataaaggcgctcatcttggtgtttaaagaattttgaaaaggaacgaatatcatattatccatcatatagatgttattccaatgctccttcaaacgagcatgatgtaaattattgccctaacaacagttactatttgcgacatgcgatatcaatgtcataccaaagatgaactattacatttccatgttcatgacattaattcaaatcccgccatatgtaatttccaacaccagtcttggcttatttgaaagcttacaacaggttcgttagtggttggttgaaattcaaaaaacctaccacaccatccactctactactcttaatcggaattcatgaaaccttcttcaaatccccaaactctgaaaagcaaaacatttatttcaagactcgttcttgtattcatcttattagaagtcttaccacttttcaatttctccttcttcttcttcagtagtaggagtaccagcagtacattgaatcctctcttcttcatacatgccatgactctcaaagtctctgtccaaggaggtcaaatcgtcatggacagtcgtgaatttcccttcatggcctctctccaatatcaaccctctcctcaacgagatccctaccatcgatgcggaggtactatcattgccaaacgatggatcttaacggctggacattgtgtcgtgctatcgggtcaggtcattccctccaacaagttatccgtcatggtcggttcgtatcgtttatccacgtgtagtttggagggttttatggatggtgtttcttcctcacctggttcttctttaacctctaacagggagagcatggagagaactactactgctactactactggacgaacgactcaatttcggttctggaattgtatccgagcgagagtgaaacacattcatgtccatcctcgttacagtgatgcctttgcagccaatgatatagccttattggaattacatgaagatttaccttggacttctaccattcaacccattgccttgactttgaaaagaccttcctttgagactcaacatttcgtgttgggttggggttattacagtggagcgaatcgggtctctgactttctgaggaagggaatggtacccattgtacctgactcggcatgtaatgagttgagattgggaatgtccacatcgcggggacagacctgtgcaggagctggagaaggagtggatacttgtaagtcatcatggttttataatttcgtataacaataaggatgatgataaatatatatttggaatgttgggatttatgataatgaatggaatggatcatgaaaaaggtgctggcgattctggtggacctttgttattcattcaacatggaatttatactcaaactggactcacaaggtaagcacgttatgatgattaagatttttggaaaattcaaaaatcatgaacatcttaatggtccacctccctgaatatctatagttatggtcctgacaagtgtggagttcaagagtcatacacgaatcgaggagtctatacttcggtcgattttcatcaacaatggatcatgtcgttaacgaatttgacatcttttgggaatttcacaaaagcggatttacagctctttggagaagcatggtcgaggcatcaattgacgttttcacaatggagtgttattggaggagtgacattattactcttgtgtatgatcttggctgcttgagtttttttaatgtcatgacctcatttgaaggttcatgaaaagtgtgaaatttaatttgacaatcattcaaacattgaagatgatacaagcaaacgaagaagaagaggattcaatgctgaacgcttttcatcgatctttaatctcatcctctctgtgaatccaagaagactctcaaacacacctggcgaatgatgtaaagattgaggtggcgcgacatcttttccttatcctatgagaatcattgagaatcctcgtcgttcaaatttttagaacgtttgttaattttttaatttttaaaaataactca

SEQ ID NO: 4756 - protein, 229 aa, Naegleria lovaniensis
  VAR_SEQ 23..25: note = X is any naturally occurring amino acid
MYFGHVQEIPFMSLISTTTRDAXXXHSGQVVALDPGVRTFQTTFDLNGYSTKWGSGGAERIGRLCCAYDKLQSKWSQPEVRHCKRYKYKRAGRRIQQKIRNIVDDLHKKLCLWLCRNYQVILLPSFETQKMVKKLHRRINSKTARKMLTWSHYRFKQRLLHKAREHPWTHIYIVNEAYTSKTCSCCGHIYTVGSSEVFRCPSCGSIFDRDINGARNILLRFLTTHRISF

SEQ ID NO: 4757 - protein, 374 aa, Naegleria lovaniensis
MTTVIGSVLKSISITQNRTLDVFVTGATGNVGMEVLKCLLSTTKKNATKTNDSEFADAEPPLRRRSLNIYAGVRQLNASTLSKFHKELFNNDPSVRIVDTSSTNEPVAIFKKQDQGSSSDDDEAILLRLIPFDFKQHGGGEVFQRVLEGNSISEYLPKDGGFHRLFLMRPPDLSNIQRDMKPFLEFITHSRPANNNSTTTYLPEQIVFMSVLGAENNKFIPHYKIEQILKEHSQRVPYVFLRPSFFMQNLTTTHLKEIRDDSQLFMPAGNGSTSFIDVRDIAQAAARILTEENAEKYANKAFDLTGSEALTYFEVAKKLSDACGRTIVYANPSIPKFMFRTWKSNPDVPFTYVMVVTALYAGKFIVKQEQYYYI

SEQ ID NO: 4758 - protein, 221 aa, Naegleria lovaniensis
MSLQSSAFKSVMLLVVVSVLLLASTHIHAQQIIPNVTIIANPVGFPINACQTNLTLSVVIASVPTIQGGNILLSRNFTWLVNTTGVNNTGSVISKLAGTSVNSSVIIVNTQLLKTNTAYYFGVNITDRIQKNQTTITTVSQLAFLNNPISVNNGTAIGGAPALPVCNGKTQNSTPVSQSKKGQVSLASPSMTYGGVLYHITCFASTLLLVSVSLMIFDIFF

SEQ ID NO: 4759 - protein, 588 aa, Naegleria lovaniensis
MMSNQFSAFVNNAASSSCKNAFGMLKKKQFCCSFSLAQSNGRWMNQSSKLFNNWPSSFWMQKSSSESLVRCFSTIMNVHRNSSREKTTYYDTNLLPEWFKTSLYNNEAAKKALSEFDVEFYDKPFIKTFPDVDKNPHETPGLDKTMFHLRPESLSDADLSKLCFVQRGKTKDYICVGEAYYFPLFRDLPVHYTPSCPSLLYIEIPDSSGKEQTPKILYQIAPFVPPMFWIPLKPSSESLARLFDEIMDIETNNVTRHIQFHENLLSHIGFKLEKLKELENDPKSAEKVYNELHIKFLDYINKTLDPNKLEFKERVLQEYPNQVYLFLGNVPKLELLEQSFMNNPFVFNTPVLLGSSNRFVSSESVQTSMFYTVFSRSLIILEARFDLHVDFSSNSSDVMVPIFARVMYPSNQRLSKPCPERMNKVLGSNFPADMPIDVCLALFGQKNSNAETIASELLEQVKSDEEMVKAGMMENIPENMFNPSIPIAHLAILRYGKWKTEIFDRFKRHSIPSVRIACVKGCLELNMLEELKAFRSSETHHEVLQYVDESITRLEKKIELMKMKEKDEADELEKRNKKLEEENQQQEQ

SEQ ID NO: 4760 - protein, 724 aa, Naegleria lovaniensis
MSWVNRKRELKKKMMEEAEEDPILMLSGGKINSSHTTFNSYNEESNTAVPMMKNDRSSEAPKSTLHSSSQSLSEKPSSNDKIIHNKSNSNIDSLDSFLNNVSSVSNKNPNHSMTSNSMFDNKPPQSGQPNLPQTKQLPNVPQSKTGSQHSTTTVKPLPKVSNPPSSVTSKVTNETTEQNVKKSDPVQSPSQKQEMTLEMFESLKKQIIELELENQKLKRELQESQGGSLHDMVEEIPSNQSTHDSGFDDYFSDKKVIVLTLSDEIREGLRCNELNKVHIVKTKTTSKKKPPVYGTEEEDEESEIINQSSKTEDGYEYKYSKTNYYVEQNKELDAWCNLRRLRDSKHKISLLKSCGKNYDIVLPILLSIEQSLNFRSFMDVLVESDRQEGYYVWLYIKFLKKLGDTSTLLKVYKFHGMIREQALLQYQLAIQKHDPYERIEDLEHCLSFIQKNAQVIDNPTGFLSHKYSLDCAEELSIAVANLIHLITKQIKIDEQDNIIAKSGKNSLFIQFKKYPIYNTTLSETLKYCLFYHNAVSDDQVTSPKSLAKFFNLSQHRFLYEAVVARSRIGDWKGVMNIFGKAKKDGLCYCSAFDLKIHKENSSFMKLISGKPNRSESNSILNIHNILQVLKIFKAPRPMIRDLLESYAFQKTEIELKFEIAKEYRIYDVAIRCIVDDLKDRDLLVKLKEDLNKRYHDADKSALQDEINSHLYNKKIKWKKATINV

SEQ ID NO: 4761 - protein, 575 aa, Naegleria lovaniensis
MLHSSSQATSSSTPGKSRLVFGKLLILIIAIAILFSTTRLNFGVEGHIITFRSENITIPTQQPRELDKYELGMYARNDLPLNFLIRPIANGDTFVKVQLAVSRSTIPKEHTKLIVLMGRTKAVESAKLDDTRTACALKSVPSNILLYRSLTPDDDIDENFEISETDFYSFILHYCPPIDTSMPNLPNTVSFFLNGEVQFINPYGHLPGQYFFFMPFQAVMTIAYIIYAVCWFFVSIINRKEFLILQFYITAVLMCCLAESVIVYFHLFLTNKVGYIDLGYMIMVQLAAVLMTVLRKTFTRLIVLVICSGFIGKSNDESSENSENEKASTGIGSWSILCFVTTFVITCSISELGDMLFYREIISHTFFLVMSIPVSVLDFIFYIWSLYLLYSTMKMYKPSSPRAVTASERVSPEWKKAVAHNHYFYLYRRLMLAMIIYAAMVMLFLALQFLYEYGRYYIDAWYLNWFFDTGSFQMAFFCIFVLIGFLYRPAKHNSLYLHAEQLPTDELDAELMLKEGTGLEYHSDDSDEKDVEMMMMHNDPMDASEESNNQNENAPRKSEEKLVFVQEQSNEENTE

SEQ ID NO: 4762 - protein, 149 aa, Naegleria lovaniensis
MSLKRIQKELKDLQIDPPQNCSAGPINPEVSMYEWQATIMGPADSPYQGGVFFLKVTFPTDYPFKPPKVQFVTKIYHPNINSNGSICLDILTKEWSPALTISKVLLSISSLLTDANPDDPLVQDIAQQYKTNRKQFELTAAEWTRKYAM

SEQ ID NO: 4763 - protein, 706 aa, Naegleria lovaniensis
MSPPATSLNDEDNTNEDLFPSITSPTSKIKSLKSLKAIHKEISSILNPKFEQCRFLCPATQIISETRHRVVILSLIYHRQNRGEYAVFIFNENLKLRECIPMKSFNFFIQLQQPQLLTTSGTKRNYLTTLEDQEMMKKFFEKSWNDDNDDDDEYQDDYTELNVRDFKDESWKTHKFLATSTRLVLYQVVNEQAQDFVFAFQNDQQLMTCLMTLSGICSELDVENEHVEFDQVFELPYDLEYAMFKDEVYDENKSNIYKPPNGYQFFTSLSNIKDQMKRANTFMNMSQQSISLRHQIQRRALEQGFTNNSSQDKSQKRLSSKLSSPGVFSVGTPPLSSSWNLLNASSNSNKEEKRKSLNNSLYTSLLQSSVMNNSNSNNTNLQSKSTLSNLTPQPFDWVLFFIERYELDVNEIEFLNPLYQDMEDGEELTEIQIIEKKKATLVEEDLVTISTMVSNSTSVLKDGQHEKKNSIGTGPEEDEYAWLLKRSEYDIEEFVNSIQRHLCVKSESKKHSSISSGTTPTINKNGNSTTTTTTTNTTPKTTITTTSVNSSKGTIPTLTTSKMVTTSAQNSVGVSPVSSPQSPPQISSTTSPTTTLTTSVQSTSSEPIPVSGYQSSLISKLQSMSNLTGTSPVATTMTPNSPPTSVASSTPPTSNVKVIGSKQANVAAQQQKEEDDDSDISISISSSSDGEDEDDDDLMLSSDDDE

SEQ ID NO: 4764 - protein, 448 aa, Naegleria lovaniensis
MTRTEEVSSSTCFETNTLSSSSLKGSESNLSPQSPLVQIPTERASTKRGEEDVATTSSFQKILVNDSHAHLDISKMELPSHGQLFYEWKKVLSSSSIPPHVFVYGRISREFSCEYSIENLTVQQNDGWYDELLQVAKRNQFLRTATDSEKECFVNIERYVLGDEFLSQVEHVLSSKFMKSQSEKMIKMDLSLLSSNYGKENHVDTSVHVKDLIDDYGLVLDVFSLLRFCHARKFDVNAVKTLIHETIAWRLYKKPHLITKESVQREYSKMKGFWLGYTKQNSPIIYIYPQNHVTYDRDFDECINYTLYMGEFGMQMIRTYNEEHVLPMLQKMNHRVDLNYIENVVLNQYVEQYTIVYDGRTVAMKNFDLAVVKEFLTLSSYYAERMKCVMVYNPNWSYKVLMKMVNQFLDKKTADKIKMVYNMSEVDEFLDVTKVPRDFGGQLDYKFH

SEQ ID NO: 4765 - protein, 533 aa, Naegleria lovaniensis
MKSLFNRIFGSNSSDSQAQHDLEQVSSSYNEQEQHSINHTPKKEQTTNRYYSSNHTPIQFMKRSLAQSSCRGAEFMKENGNKRTKLFTSGSNDSAQMGFEKKSISDSGGEWIQVHQIKGLTPTESEVILNKINVIAVGRSHSLFATTDGGIYGCGKNNYNQLGNTPTFHGTTDVELFTCMNDEILRAMKQEKEAIRERLTSSSSSSSSNHQNALQEFLNSTHFDHIYTVDHISCGWFHTLIIVNGNIILGAGHSYFGQLFGADFNKNFAVLNSKIELFNNFSNGNPYCQYTVTHSSCGTFSSCVVFNRFLIYHCGEASKGGNFAVPNCSELKSPVRDIAQTDASIYVMLEDHSLHCQQKESDHFKMEQRHVAAFGGGHMSNTSYWIKEMTDNPVVTTSDQKNMELFSVPPKLGAMEIEFFGGYYCMFGVINKKILFMHGNKLNSAKLTDIPFTNGLFSPLISAQSLMLSTHAHNKKLAEYLFMERYNIECVQSGCDVNLLLISEYVGNDFMKTRLLKQVTDENYQRFCDIEII

SEQ ID NO: 4766 - protein, 283 aa, Naegleria lovaniensis
MERMNLALHKSSTSNSVITWRLTFILFISFLCFYSLQLTTFVSGTSQAVKKHKLNKGNKQISEPLHVANINSTIPFAISEKKKKHSSCFHYRNRMASGFCKLRIKMNEKKVEKTLRRWKSLRSRVKKIEKKLSKWRLLKSKAKNRVRKMVRVIHRISKNVKCQQRKNSCKRRIHRKKKALKRASKKAKRAMKHVKRLKRKMNKMTQRKKKSFTRYQKSMSHLLRVMKLCKKRIQRVTTCKEEGKRMAQAVKLPKKLVDILRVLDVKFACLKKKTNRLACLSKK

SEQ ID NO: 4767 - protein, 2367 aa, Naegleria lovaniensis
MAPLLYLLLTIVIASIGAVWFFLKSSSSSKENKQSSDNDKNKQPTTSSDNKKTSKSTKTTTIDDHTTSKKDSQKEEPLRNDMDDKITENLSNQNDQQQVLHQQSTGTQNENHQQEGSNNNNNPSTQKIIDSNNNDVASHNAIDTTLSTPIQQEQPTKEEELELINKQLNSIEILQALCNGVMERNTHRKAISMLKAWSQSKTVRNAMVTSKRQLVIIQSWARRLKAKKSFDHSQSSVNTIQAAWRSKFETVQKTKQEEKVIRIQNMMKTKQATLEMRNALENIVKCQAQLRERLTRKQLSKELENVEKIEALAKRRIEELKIHKVLNATTRVQSLAKQSLQEKKFHQSMEDIHMLQSLFRAALAEKKHVQYLDSTLKIQALLLRQQQVNHFSQLRNHIILLQCACEAKLKRNNIEEQAKSALTIDALYHAKREYEKFLAQKEAISMFQQACRGLLQRQSIQESKESLAKLQSWIIGKIVRNTQQEQHEKIVKLTACVKSRLDRQDFNRARKQVLALQSLIRAILAKEATGKMQQEQTIVASLIQAMNQKRLVFSNFNASKFNSTVIGACYRGISQRKEFENCIHKSIVPLQALGRRFLDMKNRNKLGNLMDQVSQVQALVRSKKCRQDVEHDIQKLQVIQALIVAKRERSSLHSKLSLLSMLSSKSRAELNRKQLHSNFTRVNFLNTLSRRYIENRKFNNLMNSLTLLQSRSRAFIEQRNLKTQIMKIQLCQALCMGGLGRKILQEEKQLIKENELKQVMESTTQLQAFIRAQVVKRQQRHELQRVISLQSLLHGLVARKYLQGQHELSTAIQSQYRAMQSRHNSVKALTFVTHLQCNGRRCVQEKHVNKSRERTITVQAMVRHYLCSKTMNANMKAVECVQARGKSVLTQKQLQQSLQRLVTLQCLMRCFKNKHNQMQKLNRARVLSSLIRAHLSRQQLNLELRDLVQIQALIRSHVLQQEQRTCNSTTRMAQAMIRGIQERRSQRRSKESIDLIQALARRYIAQTELTHCVSQLSKLTSKLMSTHCRILMTRELQDISMMQSLARSTKLRIEKQHQMDQITQLQSRARQEMSSKHLLVSLQAIHTIQSAFRAKQQRDHHSKLQTLVQCVRACFISTQSRQQFKQSLEHIVSMQCLLRRHHSSQIQSNKMLTQFVTLQSLLRGSHDRIQSRHTMYALSQVQSILKGTLSQHNYWSDWQRVFLLQARLQSLKCQRKFHALKERASYFQERVDQVSLLQGFIRGFLYRRDDLLYVSSRHKNAAGSSVMVPSTSDILRQLYDEEEEEEYYEEAHSDEEELDGQDLEHLSISQNEPQDDHSSTVLTEHTQHDDHAILTNNHHHLEETHPTLEESQTSNAMSSIVGDSHQAKNGEDDGLHLNMPSTSSNVLSSSMESTPSVLTSSTNHFHKKSQSITSVFPTKLQGDQNTSTGNKNQQAPHQRRDRRNSAFLNLNAKPIQKRSQVHKLIDECIRNKSSTLDISGLDLDTIPYAAIDCKHVTSLRVANNNLATLPSWFSETFKNVTDLDLHGNQLYELPIDLAQLPLRKINISQNKFEFIPQQIVEMKSIEKMDLSGNVLLSLPTTISHLEKIEELNISENCLMTLPEDMKELKSLKFFKYDNNPYLQSEISRIAEIASAITGEKSKTIVQKLRNTDTLGYKEIVTKPKDNVYLDPYGDLTDLSDATEMYNDEEQESDYTMAEEGNLSPRGNNQSLANMSASLDTPTTPPTRINHHSDRNDQLDSAISSQLTVPSTNDQTISDTDSEDLSTTPPKYVPQIAIPKITLDAIQNQSLDSPGTNSAEISPQSVPSYEDSQKRVFGVLSKEGNERTYSEVVHMDQPLFHDHMANSHKKKKNRPKSTSYQKRSSVEDLDEELSDHQDVDNEEDELLDEHERELKEAKKIKERINMVLEILESERKYVKYLDVLWDLFYDPIVNNHFPHDKVKTPDESERLVPKSIAKSFFPHDLLTIKTFNKNFLSKLEERFKIYRDDPTKIYDMIIGDMFIKISPFFKIYTSYLSSYESCMTKIRDYRQHDTRFDKWLDKRKMHPKAAGLEIGSFMIMPVQRIPRYLLLLTNLFKNTPENHGDYSNLMSAIETVSESASTQNSKIKETNNRIKVYQLSKLMNLSDLVQPHRRLVREGEVIFGDNPRIEWKMYLFNDLILFREKKRQKTKVSKIVKAYSLLDAYISGGGQNRLTMVLTNADTNRRTEKEIFFSSLEVKMEWVVEIEKALEEVNEKREFMSKGSKSVVRTSGRAGRIFRALKSPKRDSPHMHTSSSMSELSRSNSTISASSNLSLISTPTGSSMSTGNLISTPQTPSASSSSLSSSVSSLSSSSQTPTTKSKKKSILGKLFGGLKKKAKEGKEKDVKE

SEQ ID NO: 4768 - protein, 1039 aa, Naegleria lovaniensis
MIPYKKHSLEKAAHVVIEGIHDPIVQQSPLSYRVVSSFSDENTEIQGEELQMVLKVEPKASSNHHHHNDPFKIQDFSTKEQEPHSAVPWYSSKLCRTGFEIIIYFVLYAKVHTRVRVKSAVVKTGSEQRLAHLRNNVTKFSVMDIEQIVAELELQDEAKKLQDHLANLRKSNEDALSCMVASVDEWLRTFGRAFVSETNIDKPSEKRIEKQRKPKSKKSIEKGEKPVNKTTDKTPTEPPPVTTSENNSDTIANTIPETKEETKTIWQRLLQTIENMEEKSTLEPPRQEILERPNYQYNSIKLLIDTKEHGKLFSTEHLFSQSIFQKSCTNVTSFSKALLKRILHKSVYVKQNNTIYIWGGLTDNGVTNELITLDLDKMNLSPKRQESKISERIFHTFDFVVHSNVFVVIGGIDKRGNILSDINIAGTNFAWKDYNGFIPKLCGHATASTFHEIYIFGGFNGDLQQYSNDFYCFDLFSKEIRLVMSKCPIEPRAGSSMAVIENNIYIFGGHSNSRIFSDLYRFNITSKTLFKVSSIDSWVVIPRLTMSSLYSNGGALLLFGGWNGSEWNTTLFEADSKNLRWQIATRNFDSIFDTFTPFCSATSIAGKLMLLGGIPNQIPFVSFQDTLLRFVCCKEPLEARDNSALIAPSFRTLHQKRTKDDLDLCRFYLEWYNTGAPEECDVTILINQLDENAEQEKFYGHKLMLARSSVLKKKIFALDMFEQHETERAQDIMNDFLNSSEASLKHGHPVAILLDDLPIQNITNLRTSFKCIMQYLYSGMFETKYLTTSDFEDIYILACYLELPLLKKALCADVFTFSDMNSHCLLVYLAQTMKTFLTLEDEVIENINDYVQHKIDQNPVPIGMVRLVAPTSLDLDVASYRSVLVHKWILTKRSKYFHSVFEMNFLESKTRVMIFEQNTIRSVLTILNYIYTLYLSSVDMDQSNAVEIYMSSFQFELGELHEYSKNVIREQQNVDIPTMIQLLEICDVVDDKLMKGFCKFNIAKHYDEIMKTDPSMLDKFDRDVRLDIQKQYCNFIKKK

SEQ ID NO: 4769 - protein, 438 aa, Naegleria lovaniensis
MPKKIEKYQLGKTLGRGTFSKVKLAVDTTDNSHWAIKIIDRKMVKQENMEAQLKREIAIMKILKHKHVVQLREVLQSSKHIYIVLELITGGELFDRIVEAKRFDENTARKYFQQLISGIAYCHSQGIAHRDLKPENLLLDAEDILKISDFGLSALSGTDGQSKLLMTTCGTPNYVAPEVLKEKGYDGKKADVWSCGVILYVMLAGYLPFEDETMKGLFAKIELGKFSYPPHFTPAQTDLISKMLVVDPDKRITIDQVMDHKWFKVDFKMDKTTSKISLTDKEIDASVKSTADATEVQPSTTPQPTQFKAGTLNAFDLASMLMMGSINPLMSSDASVKIKRQTRFMAKGSKSQAQTAIVHTLDQLKAKPTTKGDDEIKCMATVNQSVITFSVKIEETSGGFSVVEVRRGKGNILDYNAFYRLLVTQLGDLVVSKEITNK

SEQ ID NO: 4770 - protein, 268 aa, Naegleria lovaniensis
MNNNNNGNNNMGQVSPLKTGSFGFPSPQTPTVSTPIQHNNSGNNNNSGGQLSGNNNNMLPNANATSASQQQPPSLRSTMSGSIFSFSSDHIMDDEDGDVGMLMSTSHNDLSFNSLSSSPYLSPFINTQQRTSTSSVSSSTSDIFQTSSPHNNRNFSLTNTVPPINSLFRDSNSSLQDPFNNDQFNISKQEQRETNQRILEALRSTPLNPVGTGQNSATSYDPLFDSDAFLRGRTSSVSSTDIRLSDSCTTPLTPTEQGRSSFSKISHF

SEQ ID NO: 4771 - protein, 467 aa, Naegleria lovaniensis
MSLSEYVRREDLKSLYALPMKEASKKLGVSESSLRNICRKHNIERWPYRKFQQLDAHIASLQNVEASQQSAQQREMIESLLRARSILEENPNMTCEMAILQANKQIMSNNPNASSQDMTAVMMMMMMNSASQEDSSPTISSCAESVAQSSAQMNPSNNHHAQNGANFVPIYPVHVTSHLSASAALSAMARRKKPTHGELISPTPSNNMIHNSNIPNLNNNNGWNSSSMMTMGQRSMPQQQQPNQHMIDPTAMLKQHVNTRFTDTELMQSYATINNGNIPIMIIDPHQQQQQQHHSPQLNSPFSQEFSERRFAVSHRDSVALKSGFLTPTQNYPVNGNNAFMMNNNNTTLPYGVAPMDENENVMMDSNAGEMNHMMSHEMASHYLAQQQQFHQQQQQQPMNMQHVQITTTNADGLMDPNSNELSPNGDLTSKSRHISLLKQARKQLPQPRSLSTSTATQRPLNTHHPL

SEQ ID NO: 4772 - protein, 1010 aa, Naegleria lovaniensis
MPTANKTFWQKLSDQHNHNAPDIRSTASIMPSVKKRVYFEDQPFMVENITPATNVSYEECYSELKYVCRGINRNNYSKLLTGKQIYNCDYDIIGVIRDELTLESACCSKYCSIFQNQCRQCSELEKHLVSIMENRHDIFEMLLKGILPQPKQLISFPLLMYELLCKLVPFIPVSQDEHKLLTVFRKAQTSYNEALSTQYNNKQITNNEHRDTQALKVPRSSFTPFLETFFGSFIFNQLQNYTKNPFHHKYSEVERRYWVVMKYYCGKQFFIRMGGERNQNIERNNFNHLKYNLIIPSWNTVKQWTPAGCYGMIPDITLTLKNMLLPDSCKDTCISFDGMKVFKHFDVLGDQIVGSEKYCYTVEDVKQFGVKHLIDQMILFSINAIDNSWHLPLGWFGVSSETDVLEFVTSKILYFKELLQESVTIVCGCSDAEIDAHAVQTIIRKKHKDFIFVNDYVHNFKNQRNVLFNGTILHEKISMQTIIYYMIQHRTLYRLLDREEVDPTDIMNLKSCLNLTERPVLQELRKIGTIEANSVAGYLELIRDIYDCINDNSPDIIDILSESKTIFEKLPNYPKKTKKICVHTLEGFLALASRFPNFKPSCITTNYEELLFSIIRGMFPKPTTKQFCQSALFSFYIFLILHSTDDVRGFSLPDIPLTDHYFGMKLVIKILPTLPGRIVLDRNVKKKTCKELQIINQNVATYSRKTTLRAEVCAPKCIYLCCPVSGCKKQKPYIIKGSFTNHLKAKHQFSDEEAEATVAQLECLQFSAQLEKDVAFRKQSCKNNENIIVQHKPPYLISKFKNRLTIQYNFAPLKSIPTPHCINQETRRPLNFFVLDLETTGFSPKCNSIIQFAMLSLFSNELHSIFVSPSGVWSSIALQMHETKFQILDESETLQNMIPKICNYLTRNDTADVMLLVHSTGLDKAFFSAAIAPLKLRSTIYYCSTMQKNLLGKKGLENHFREKVCDSLPGIAHNAVVDVLMLYDLLLSKFGNDQEIVKAIGKAECTTIDD

SEQ ID NO: 4773 - protein, 163 aa, Naegleria lovaniensis
MPTNYSSMLQHSLLLLGLSFLLMVVTTSIGMNVVWGANPESGHVKHIVAFRYAQNVTQVEKDLVMKTYFSLKDRCVLPTNGKPYILAMDGGYPNSPEGFDQHMEQIYILTFKNVADRDYFVGRPFHYPYDPLHDAFKKMVGPYLRTPISEGLIVMDFTVLNEP

SEQ ID NO: 4774 - protein, 209 aa, Naegleria lovaniensis
MVYEIVYFDHYGRVDLVKLIAEVANIPYKFVGIADKDWKDFQPTTRYGLLPFVKINDKWTLYQSIAISRFFAQEGEGHLYPSDRVEATITEEYVAALEDAYNQFVYATFLAPEDRKEEETKRLTEGVLTSVFKVLNAELEKNGGYLLPGGKLTWADLYFVEFASNLSYYTKIDPVKFAPQIPKLRENVLKHPRAKAYLESERNLRKSVF

SEQ ID NO: 4775 - protein, 311 aa, Naegleria lovaniensis
MCHLCWTEPGKFGTISIITNVTSLSIYVKYQATLLRNDHLIQFAGIQRKNLKELNLIGRSNVTGYGFKQSFQVQETLESLSVIENHALEFCYLQHLPKLKRLEVNGCPYFLRESLDNKQAMSIVFFTDLTHVCCDVDYTKHLVQSSKNLLVVDWSSSNQGYSHADHNFAAKELIVRSHQICQDRPNLQMNCLKIIMDDRDWGKILLYTLTHLEKSANIPLHLPSSMKMYLELGIEILADSVEDKQSKTRMYFQQLLNSMYTVRDQNRKDSYDNNSTPIAYKYFKPSWLNDHNVQYGQQQLVELLKRMLSSN

SEQ ID NO: 4776 - DNA, 25860 bp, Naegleria lovaniensis
  source 1..25860: mol_type = other DNA
  variation 2057..2066: note = n is a, c, g, or t
ccactttgtgctgtacggctttttcttcattttcgtcactcttatttacaacaaaatcgtgaggataaaagtcatattctccaacatggtctaaaggttgaagcatggtacttggcagttctttctctatggaagcatcttgccattcaacatcgacaacggtatgagtattatcgataacgaccactttttctcgaatgtccatggattgtgtttcatagtcatcaatttcgacaaattggggagcatcattgttgtctgttaaaacaacaatgtcattgacgctccaattcgagtaggtaaagtatttgaaaattttcaagtctttcaaagttatgtcttcatcaggtggttccacattcatatctacagaatgaatgaatgaaacagacacgtgcacgggagtaatattaatgacttgacctattttgtgcttgtcagcattatattttgctccattcaaccaatgagcttgattcagaatccgttttctatgtttcgtgttaaaattaatgagttggcatggatagaacgcctggctttcatcttctatatctgtgtccaataattttactggattaggccttttgagaatgcattttgacccatcgttaaacaaaattgcaacgttaaattcacaatattcaatttttgttaaccaatcatggtaaatggcataggaacccgtcttgtaatagtgtagaggttttagccattttgaatttacgtttttcatcttgaccgcattgtctctacatgttcctgtaaatgattctaccgtgttcataaagctaacatcgcaatacatggtcacatccataacagttccactctgtttgaaaggatcactgatcaaacaaataatatctccatgaagtaatgatcgatcaatcaagcttaatgtattctcttcaacgacttcctttgttccattgtcccattctacaacgacttgtcctttttgaagttctggaaggctttcatcatccgagtcatccgagtcactatcatcatcgagagacccaaatactttttgaacaacaccaatcatcacaggatggtgtttatgttgatgtttatcgcgatgagagggttccgatggttccgtgctctgcaaagtaactacatcttcaaagcaaaacctagtacatggtctagtggttgttgttgttgctgctgattcactcttgttcgtacccgaagaagagcatggtgcggttgaattgttgttgtggctgccctcagattccgattcatcaaaattttgcatttttttatggattgaaaattaacagttcattccgaaattgtttgggtgaacttcaaactaaaggtttaatgatattatttttgtttggaagagcagccattgaacaaatgtaagtaatctagaatgaattgatccactgttattggttttctctctaacagagactcaagatctgttgtgattcttcctgctttaccaaaccgttgaagccaaatgaacaattacagcaatttctttcaaaaaccatcactaaaacacagtcctgatgacgcaaggtttattaataaccttgtttttattaacggttttaagttgctcagcactaaaataaaagagcaaaagccacaatttattacaaattcaacaagtaaatataatcatcaacagtcagttcctgacgaaccattcattcattctttgaatcaaaagtgttgttttggaggtggataaggaattgtcaaggcgttcacttttccatgatcagttccgacgaaaagaatgaatcaagttattcaaattgatagagtttcaattcaatgagtcattcaatactgatagagtttcaactcttgttgaggttatcaaaaaaaaactcaacaacaaccttaatctcaaacaatgaagagaagtagagaggatgaacctactcatcctcctactaatccatctcttgcacacggcatcattccattctgggatgagtactcacaacaagtatcggatgtactttgggcatgttcaagagattcctttcatgagtttaatcagtacaacaacaagggatgcnnnnnnnnnncattcaggacaagttgtagcattggatccaggagtaagaacatttcagaccacctttgatttgaatggttattcaaccaaatggggctcaggaggtgccgaaagaattggtagattgtgttgcgcgtatgacaagttgcaatcgaagtggtctcaaccagaagtcagacattgcaaaagatacaagtacaagagagcaggaagaagaattcaacaaaagattagaaatatcgtggatgatttacacaagaaactgtgtttgtggttgtgtcgaaactaccaagtgatcttacttccttcgtttgagactcagaaaatggtaaagaaactccataggagaattaatagcaagacagcaagaaaaatgttgacttggtcacattacagattcaagcaaagattgcttcacaaagctagagagcatccgtggacacacatttatattgtcaacgaagcgtacacatccaaaacttgctcatgttgtggacatatttatacagtaggatcatccgaagtgtttcgttgtccatcatgtggctcaatttttgacagagatatcaatggagccagaaatattcttcttcgattccttactactcatagaattagtttttgagcaccttgtgtgttgggtcttccctaccttgtgtgcgttgggtcctttcccctggctttcactctttgagtgtttgcttgcaagatcagcattttgttcgatttgtttgttttgttcaaattgttgatttaaataaaggcgacaaactatatatagtaatattgttcttgcttgacaataaacttaccggcatagagtgctgtcacaaccattacataagtaaatggaacgtctggattgctcttccatgttcgaaacatgaattttggaattgaaggatttgcgtaaacaatagttctgccacaagcgtcggaaagtttttttgccacctcaaaataggtcaaagcttcacttcctgttaaatcgaaagccttattggcatacttctctgcgttttcttccgttagaattcgggctgctgcttgtgcaatgtctctgacatcaatgaaggaagttgaaccatttccggctggcatgaataattgagaatcgtcacgaatttccttaaggtgagtcgtcgtgagattttgcataaagaaacttggcctcagaaatacatacggcactcgttgggaatgctctttcagaatttgttcaattttgtaatggggtatgaacttgttattttctgcacctaacacagacatgaatacaatttgttcgggaagataagttgttgttgaattgttgttggcaggacgagaatgtgttataaattctagaaatggtttcatatctcgttgaatattggacaaatcgggcggtctcattaagaacaatcgatgaaagccaccatcctttggaagatactcactgatggaattgccttcgaggactctttgaaacacctctcctcctccatgttgcttgaaatcaaagggtatgagcctcagcaatatggcttcatcatcatcactggaggagccttgatcttgttttttaaaaattgccacaggttcattagttgaagatgtgtccacaatcctaacagaaggatcattattgaataattccttatgaaatttagagagagttgaagcattgagctgcctcactccagcataaatattcaaacttcttcttcggagtgggggttcagcatcagcaaactccgagtcgttagtctttgtggcattcttttttgttgttgataataaacatttcaacacttccattccaacatttccagtggcaccagtaacgaatacatccagagtgcgattctgtgtgatactgattgatttaaggacgctgccaatcaccgttgtcattgtggggatgtaaagaattgttttttgatgctcaaggttgtttatcggtagtacgagagatgtcatgctttctcgtttagcagcgcagttataggacaaatgacggttggctgtattgataaaaaatggaaattttcgaacatgctcttgattcacccacacgattgtttagtatcccatccacaagataccataagtatccgggtggaaataaccaaccgctgggcgtacccagtttgttgccacccaatgaaccaaggtagtccaagtcaccatctttgccttgtaaaaagaaactcaccgatgaaattgcctccaccccctccagcaactaaaaagtgtaattagtggcacttcccttcattgtgtaacaacccaaaggatgttaaagaatacaagtaaaaaactttattcaattcaaggaaattcttcccatgggaagtggtcatctaactagaagaatatatcaaagatcatcaaggaaacgcttactaacaacaaggtagaggcaaaacaagtgatgtggtacaacacaccaccataagtcatggagggtgatgcaagactgacttgacccttctttgactgacttactggagtagagttttgagttttgccgttacaaacaggaagagcaggtgctccaccgatagcagttccattgttcactgagattggattgttaaggaatgcgagttgagaaactgttgtaatggtggtctggttcttttgtattctatcagtaatgttcacaccaaagtagtaagcagtgttggtcttgagaagttgtgtgtttacaataatcacactggaattgactgaagttccagcaagttttgaaattacgcttccggtattgttcactcctgtagtgttgacaagccatgtgaagtttctagagagaagtatgttgcctccttgaatagttggaacagaggcaatcacaacgctcaaagtgagatttgtttggcatgcattaattggaaatccaacagggtttgcgataattgtgacgtttggaatgatttgctgagcatgtatatgggtgcttgctaacaagagcacactcacaacaaccagtagcatcacagacttgaaagccgatgattggagactcatgagataaacgttggtaattcggaaaggtttgtggaaaggaaaatcacagagcaactgtcgaaggtattacaataatgtcacgtatttcaaatttttcaatattgttaatttacacaactgatggctgtgaacaagaaataacaattggaagacccttcggtttctactttgactgaaattatcaatatcgtacttcattaatcagtcttacattttggatatggttcattaataaaattgttctctatttggaattagaaacaattccaaaaaagttatttcaataattattgttcttgttgctggttttcttcttccaacttcttgttccttttttcaagttcgtcggcttcatccttttccttcatcttcatcaattctattttcttttctagacgagttattgattcatctacgtattgaagaacttcatggtgggtctctgaacttctaaatgctttgagctcctctaacatgttcaattccaaacatccctttacgcatgcaattctaacacttggaattgaatgtcttttaaatctgtcaaatatttcagttttccacttgccataacgtagaattgcaaggtgagcaattggaatggaggggttgaacatattttcagggatgttttccatcatacctgctttgaccatttcttcgtctgatttcacttgttccaaaagctcactggcaattgtctcggcattgctattcttttgtccgaataaagccaaacaaacatcaatgggcatatcagctgggaagtttgaacctaacaccttgttcattcgttctggacatggttttgatagcctttgattgctgggatacatgacacgagcaaaaattggtaccattacatcggatgaatttgaggaaaagtcaacatgcaaatcaaatctggcctctaatataatgagcgagcgcgaaaatacagtgtaaaacatgctagtttggacgctctcactggatacaaatcgattggagctacccaacaaaacaggtgtgttaaaaacaaaaggattgttcataaagctttgctctaacaattcaagtttgggaacatttcccaagaataagtatacttggttgggatattcttgaagaactcgttccttaaattctaacttgtttggatccaatgttttgttgatataatctaaaaatttgatgtgcaattcattgtacaccttttcagctgattttggatcattttccaactctttcaatttttcgagtttaaatccaatatgcgaaagcaagttttcatggaattgaatgtgtctagttacgttatttgtctcaatatccataatttcatcgaaaagtcttgccaatgactcactggagggctttaaaggaatccaaaacattggtgggacaaaaggtgcaatttgataaagaattttaggtgtttgttcctttccactgctatctggtatctcaatatataataaacttggacatgatggagtataatggacaggtaaatctctaaataatgggaaatagtaagcctctcccacacaaatataatcttttgtctttcctctctgcacaaagcataatttactcaaatcagcgtctgaaagagactcggggcgcaaatgaaacatggttttatcaagccctggcgtttcatgtggatttttgtccacatctggaaaagttttgatgaaaggcttgtcataaaactcaacatcaaactcggagagggcctttttagccgcttcattattatagagagatgttttgaaccattcaggtaaaagattggtatcatagtatgttgttttttctcgagaggaatttctatgtacgttcatgatggtagagaaacatctcacgagagattccgatgatgatttttgcatccaaaatgatgacggccaattattaaataatttactactctgattcatccatctaccgtttgattgagctagagaaaaactacaacaaaattgtttcttctttagcattccgaaggcattcttgcacgacgatgatgcggcgttattgacaaatgcactaaattgattactcatcatttttttcaactcaacctatttgagataaaggaagctgaatcttgagaatttgaaagtgaaacaaggacgatgtttctctcctcgaattctactgctttttggaataagtatccattcttttggtgttgaaaaaaagaaaaaaatgtcttgggtgaatcgaaagcgtgaattgaagaagaaaatgatggaagaggctgaagaagatccaattctgatgctttcaggagggaaaattaattcttctcacaccactttcaattcgtacaatgaagagagtaatactgcagtaccgatgatgaagaatgatcgttcttccgaagctccgaaatcaactcttcattcatcaagtcagagtttatctgaaaagccttcttcaaacgacaagattattcataacaagagcaatagtaatatagactcattggattcattcttgaataatgtttcctcggttagcaataagaatccgaatcattccatgacatccaattcaatgtttgataataagccaccacaatctggtcagcctaatttaccacagacaaaacaattaccaaatgtaccacaatcaaagactgggtcacaacattcaacaaccacagtcaaacctctaccaaaagtttcaaatcctccttcatcggttacctcaaaagtgacaaacgaaacaactgaacaaaatgtgaaaaaatctgatcctgtacaatcaccctcacaaaaacaagaaatgactttggaaatgtttgaatctttgaaaaagcaaataattgaactcgagttggaaaatcaaaagcttaaacgagaattacaagaatcgcaaggaggatcactacatgacatggtggaagaaataccatctaatcaatcaacacacgactctggctttgatgattattttagtgataagaaagttattgttttaacactttctgatgaaattagagaaggtctgcgatgcaatgaattgaacaaggttcatattgtaaaaacaaaaacaacctctaaaaagaaacctcctgtgtatggcactgaggaggaagacgaagaatctgaaattatcaaccaaagtagcaaaactgaggacggatatgaatataaatatagcaaaactaattattatgtggaacaaaacaaggaattagacgcatggtgtaatttgaggagattacgagactccaaacacaaaatatcattactcaaaagttgtgggaaaaattatgacattgtcttgcccattctgttatctatagaacaatccttgaattttagatcattcatggacgtacttgtagagtcagataggcaagaaggatattatgtatggctctacattaaatttttaaaaaagcttggtgacacatccactctgctgaaagtatacaaatttcatggaatgattcgagaacaagcgttactgcaataccaattagctattcagaaacatgatgtaagtgatatgtgtgttgagaattctcaatgattcaaataatgaattgtaactttcaaaacctggttggatacatgcaattcatgaattgtaacaatgtcaatgttagccctatgagagaattgaggatttagaacattgtctgtcattcattcagaaaaatgcacaagtaattgataatccaactggatttttgtcacacaaatattctcttgattgtgccgaagaattaagtattgcagtggctaatcttattcatctcatcaccaaacaaatcaaaattgacgaacaagataatataatcgccaaatccggcaagaattctctatttattcaattcaagaaatatccaatttacaacacgaccctctcagaaaccttaaaatattgcctattttaccataatgcagtctctgacgatcaagtaacctctccaaaatcacttgcaaaattctttaacttgtcacaacaccgatttctatatgaagcggtcgttgcaagaagtcgtattggagattggaaaggagtcatgaatattttcggaaaagctaaaaaagatggtctctgttactgctcagcttttgacttgaaaattcacaaagaaaatagctctttcatgaaattaatctctggtaagcccaacagatctgaatccaactcaattctcaacattcacaacattcttcaggttttgaaaatatttaaggcgccacgtccaatgattcgagatttactcgagtcgtacgcattccagaaaacggaaatcgagttgaagtttgaaattgcaaaagagtacagaatttatgacgttgcaattcgatgtattgtggacgacttgaaagatagagatttattggtcaaactaaaagaagaccttaacaaacgatatcatgatgcggacaagtcagcacttcaagatgaaattaacagccacttgtacaacaagaaaatcaaatggaagaaggcaaccattaatgtataactgtggagtatcttcgcttctttatgaattgtaggcttcacaccatctcacactccaagagacaggtggtatttatcaataaattaattaaggaagtaaatctactagagcagacttctactctgtattctcttcattgctttgctcttgaacaaaaacaagtttttcttcactttttcggggtgcattttcattttggttattggattcttcactagcatccataggatcattgtgcatcatcatcatttcaacgtctttttcatcgctgtcatcgctgtgatactcaagacccgttccttctttcaacatcaattcagcatccaattcatcggttggcaattgctctgcatgaagatagagagaattatgttttgcaggacgatacaaaaatccaattaatacgaaaatacagaaaaatgccatttggaacgatcccgtgtcgaaaaaccaattcaaataccaagcatctatgtaatatcttccatattcgtacaagaattgtaaggccaagaatagcatgaccattgctgcataaataatcatggcaagcattaatcgtcggtataaataaaagtagtgattgtgagcgactgcttttttccattcaggagaaactctctcactggcagtcacagctctgggactcgatggtttgtacattttcatagtagaatataacaagtagagcgaccaaatgtagaatataaagtccaggactgatacaggtatggacatgaccaaaaagaatgtgtgagaaataatctctctatagaagagcatgtctccaagctctgaaatgctacaagtaattacaaaagtggtcacaaagcataagatagaccatgatccaattcctgttgaagctttttcgttctctgaattttctgaagattcatcattcgattttccaataaatccagagcaaataaccagaacaatgagtcttgtaaatgtttttcggagtactgtcatgagtactgccgctaattgaaccataatcatgtatcctagatcaatatatccaactttgtttgtcaaaaatagatgaaaatagacaatgactgattctgccaagcaacacatcaagacagcagtaatgtaaaattgaagtatgagaaattcttttctgttaatgatagatacaaagaaccaacaaacagcataaataatataagcaatagtcattacagcttggaactgttgatggatgaaatcaacaaaaaattgtcaatacatgttttgtcgaaaaaattaaagcccaaaagagctaaccttggcacttactggcatgaagaaaaaatattgtccaggtagatgaccatagggattgatgaattgcacctctccatttaaaaagaatgagacggtattgggtagattgggcattgaggtatctattggagggcagtaatgcaatatgaatgaataaaaatccgtttctgatatctcaaaattctcatcaatgtcatcatcgggtgttaacgagcgatacagtaaaatgtttgaaggaacgcttttcaaagcacatgctgttctctgttattgtgcaattgagaatttaaaaaatgttaaaaattgttaaatgtaccattatgcattagaaaagattcacatgcaaaacatactgtatcgtctaatttagcagattcaacggcctttgtgcgtcccattagtacaatcaatttagtatgttctttgggaatggttgatcgtgacacagccactgcaatttgttacaagttgaatttaatatttttaatattgtgagagatccatgacaacttacattgcactttcacaaatgtatcaccattggcgataggtctaatcaaaaaattcaatggtaaatcatttcgagcgtacattcccaattcatacttgtccaattcccttggttgttgtgttggtatagtgatcttcccgaacgtaattgaaagacaaagtaaatacaatgaccgatgcgattcggaacataaatccattcaaacataatggtgcgatcacatgtacccgaacaacccatgatttcccgtgatttatcacaataattattcaacaatcgtaaaagtatcacaatgtcatcatcatcatggttggttttttgaaaatcacaaataccaaatcttacattttcgctcctaaaagtaataatatgtccttcaactccaaaattcaaccttgttgttgaaaataaaattgctatcgctatgatcaaaattaaaagttttccaaacacaagccggctctttccgggtgttgatgatgatgtggcttgtgagctcgaatgaagcattttttctttcaaaaaatctgtttgaaacgtttgaggtccgtttcctttgatattcaaaagaaaggctgagaaaatttctccttgcaagattgatattaaagagaacttgttcaatatgctgagggataggaattgaaagaactaaaacacctcgacattccaatttccgcaaggaaatgatttctcgagtttggattgcaatccacacacaaacaattgggaattcgcttctcgtcatcccgataacactgaatgaacaaaaattcttgatccaatttgtttgaacacgattgaattaaaaatacaccaattccgattacaaaacttggcgctttccaatacctcaaaaatcactctcgtaaaaaaaaaacgaaagacaccagagactcttcattaccaaccacatcacctgtataaatcatcatgtcgctcaaaagaatccaaaaggaactcaaagaccttcaaattgacccaccacaaaactgctccgctggacctataaatcctgaagtgagtatgtatgaatggcaagcaacgataatgggaccggtaagtgttttccacgcgaatttctggaaattaacgttggaatgtatttttatttcgtatgatgacttgtgttcttttgtttgcaaattgttccgtgattttgtaatgaattgctaattcggttacgatgatgttttcattatggattgaaattgatgcatgtgattggaattttatgttttctattcgattaatgttgatgtaattacgatttgaattttgtatacattcactgaatcatcaaattctcaacaacaacaacaacaactctttgctcgaactctttactgaaatccccgctaaattgccattgaaccaaacaacaataacaactattaattattaatgacaacgcaacaacaggccgatagcccatatcaaggaggagtcttcttcttgaaagtcactttcccaacagactatccattcaagcctccaaaggtacaatttgtaactaagatctaccatccaaacatcaattcaaacggctctatttgtctagacattttaacgaaagagtggtcccctgctttaacgatttcaaaggttttgctttctatttcatcccttttgactgacgccaatccagatgatcctctcgtgcaagacattgctcaacaatataaaaccaacagaaaacaatttgaattgaccgctgctgagtggacaagaaagtatgcaatgtaagaagggacagttgtaataaacgtgctccttgtgtaaaaatagcaattcaatgtgtcgtgaatgcattttgtcatcgaatcgagaaaagaaaagtgtgttgttgaataatgtgtaatttattcatcatcatcactactgagcattaaatcatcgtcatcttcatcctcaccgtcagaagaagaagaaatactaatcgaaatatccgagtcgtcatcttcttccttttgttgttgagctgctacattggcttgttttgaaccaatgaccttaacattggaagtaggaggtgttgaactggccacactagtaggaggtgaatttggtgtcattgttgttgccactggtgaggttccagtaaggtttgacatgctttgtaattttgaaatcaaacttgattgataacccgaaactggaatgggttcggatgaggtagattgaacacttgttgtcaaagtagtggttggtgatgttgtcgaactgatctgaggtggtgactgaggtgatgacactggagatactccaacactgttttgagcacttgtggtcaccatcttgctggtcgtcaatgttggtattgttcctttcgaagagttcacagatgtagtagtgattgttgtctttggagtggtattcgttgtagtagtagtagtagttgaatttccattcttgttgatggttggtgtggtgcctgaactgattgaagaatgtttcttggattcacttttcacacataaatgtctctgaatagaattaacaaattcttcaatatcatattcggaacgtttcaataaccatgcatattcgtcttcttctggtccagttccaatagaattcttcttttcgtgttgtccatccttcaagacggatgtcgaatttgacaccatggttgaaatggtgacaagatcttcctcgaccaaggttgccttctttttctcaataatttgaatttctgttaattcttctccatcttccatatcttgatagagtggatttaaaaattcaatttcattcacatccaattcatagcgttcaataaaaaagagaacccaatcaaatggttgaggtgtcaaatttgacaaggtcgatttagattgtaaattagtattgttgctattactgttattcatgacactggattgtaagagtgaggtatagagagagttattgagagattttcgtttctcttccttattcgaatttgatgatgcattcaaaagattccacgatgaagaaagaggaggagttcctactgagaagacacctggcgaagacaatttcgaggaaagtctcttttgtgacttgtcttgtgaagaattgtttgtaaaaccttgttccaaagctcttctttgaatttgatgtctcaaagaaatggattgttgtgacatgttcataaaggtgttagctctcttcatttgatccttaatattcgagagtgatgtgaaaaattgataaccattgggaggtttgtaaatatttgatttgttttcatcatatacttcatctttaaacatggcatattccaaatcatagggaagttcaaaaacttgatcaaattccacatgttcattctcaacatccaattctgaacaaattcctgacaaggtcatgagacatgtcatgagttgttgatcattttgaaatgcaaacacaaaatcctgagcttgctcattcacgacttgatagagaacgagtcgagtggatgttgcaaggaatttatgtgtcttccatgattcatctttaaaatctcttacattcaattccgtataatcatcttgatattcatcgtcgtcgtcgttgtcatcattccatgatttttcaaaaaattttttcatcatttcctgatcttccaaagtcgttaaataatttctcttcgttccacttgtggtcaacagttgtggttgttgtaattgaataaaaaaattaaaactcttcatcggaatacattctctcaattttaaattttcattaaatataaatacagcatattctcctcgattttgtcgatgatagatgagtgatagaatgaccactcggtgtcttgtttccgaaatgatttgagtggctggacagagaaatcgacattgttcgaattttgggttgagaatggaagaaatttctttgtggatagctttgagagatttaagagatttgattttggaggttggtgaagtgatcgaaggaaataaatcttcatttgtgttgtcttcatcattcaagcttgtggcagggggtgacattttttgtctgtgtttgacggatctcattgacaagcgacatgcccgggatcggaaaatgcccgcttttccaaattactaagcaagcttcctcaaattacaatcaaaaaacaaatcaaatttgataaaagcattccaattacctcctcgaaatgcatccattaggctcgtgacacataaaaattacgagagacacgacgtacattcaaaaaaattgaaactcattctctcattgttccttctattcccgaccgaacaaaccatcacgttgcattgagcctcatctccaaaccattcattccatctctcacgcaatgactcgaacagaagaagtttcttcctccacttgtttcgaaacgaatactctctcatcctcttcattgaaaggttctgaatcgaatttgagtcctcagagtcctctcgtacaaattccgacggagagagcaagtacgaagagaggagaagaggatgttgctactacttctagctttcagaaaattcttgtcaatgattcgcatgcacatcttgacatttctaaaatggaattgccttctcatgggcaactgttttatgaatggaagaaagtattgagctcttcttcgatacctcctcatgtgtttgtatatggcagaatttcgagagaattttcatgtgaatattctatcgagaacttgaccgttcaacagaatgatggatggtatgatgaattattgcaagttgcgaaaaggaatcaatttttacgaactgcaactgattctgaaaaggaatgttttgtaaatattgagagatatgtattgggagatgagtttttgagtcaagtagaacatgtgttgagttccaaatttatgaaaagtcaaagtgaaaagatgatcaaaatggatttgtcattgctttcatccaattatggtaaagagaatcatgtcgatacgagtgtccatgtcaaggatttaattgatgattacggcttggtattggatgtgtttagtttattaagattttgtcatgcaagaaaattcgatgtgaatgctgtgaaaacattgattcatgagaccattgcttggagattgtataaaaaaccacatttaattacgaaagagagtgtacagagagaatattcgaaaatgaagggcttttggttgggttacaccaaacagaattctcctattatttatatttatccacaaaatcatgtcacatacgatagagattttgatgagtgcattaattatacactctatatgggagaatttggaatgcaaatgattcgaacctataacgaagaacatgtattacccatgcttcaaaagatgaatcacagagttgatttgaattacattgaaaatgtggtattgaatcaatatgtagaacaatacaccattgtgtacgatggaaggactgtagcaatgaagaattttgatttggcagtcgttaaggaatttttaacattatcaagctactatgctgagagaatgaaatgtgtgatggtgtacaatccaaattggtcttacaaggttctcatgaagatggtcaatcaatttttagacaagaaaactgcagacaaaatcaaaatggtgtacaatatgagcgaagttgatgagtttctagatgtgacaaaagtgccacgggattttggagggcaactcgattacaagtttcattgagtgtcataatgacaaatattggtttattctaacataacgaaataacaacttcaggtaaagatacatgaattttttcaaatgtttatttatcatataatctcaatgtcacaaaatcgttgataattttcgtctgtgacttgtttcaataatctggttttcataaaatcatttccaacgtattcagaaatcaataataaatttacatcacatccagactggacacattcaatattgtatcgttccatgaacaaatattctgccagttttttgttgtgagcatgtgtagaaagcattaatgattgtgcagaaatcagagggctgaatagtccatttgtgaacggtatatctgtgagcttggccgagttgagtttgttaccatgcatgaagagaattttcttgttaataactccaaacatgcagtaatatccaccaaaaaattcaatttccatagctccaagtttgggaggaacagagaaaagttccatattcttttgatcacttgttgtgaccacagggttgtctgtcatttctttgatccagtatgaagtattggacatgtgacctcctccaaaggcagccacgtgtctctgctccatcttgaaatgatcagactccttctgttggcaatgcaaagagtgatcttctaacatgacgtagatactggcatctgtctgagcaatgtctctcactggcgacttgagttcagagcaattaggaacagcaaaattacctcctttggatgcctcaccacaatggtaaatcaaaaatctattaaaaacgacacaactcgaaaatgttccacacgatgagtgtgtcactgtatactgacaatatggatttccattactaaaattattaaacaattcaatttttgaattcaatactgcaaaattcttgttaaaatctgcaccaaacagttgtccaaaataagagtgaccagctcccaaaatgatatttccattcacaataatgagcgtatggaaccaaccacatgaaatgtgatccactgtgtaaatatgatcaaaatgagtggaattgagaaattcttgtaatgcattctggtgattggaagaagaagatgatgacgacgatgttaatcgttcacgaatggcttccttttcttgtttcatggctcgcaagatttcatcattcatgcacgtaaagagctcgacatcggtcgtaccgtgaaaggttggagtgtttcccaatcttaatttgattcattttcgaattattaataattattataattctatcaattacttactgattgtaattgttttttccacagccgtagataccaccatcggttgctggattgaaagttattattattgttgttattgttgaaacaacaaatcatgcaaatatattcattaaatataattcgaatacatgagtatgattgaatataatgatctacctactagcaaatagagagtgagatctaccaactgcaataacattaattttgttcaagatcacttcggattctgttggcgttaagcctttgatttgatgaacttgaatccattcaccaccactatcggagatggacttcttttcaaatcccatttgagcactatcattagatcctaattgattcgatcatcacgttgttcaatgattgcaaatagattatgatcaaaaaagatcatcatattgttgtgaagatttgatataaaagcaagatgaaataataatccacctccatcgagctataaggcttccaatgacatacccgaagtaaataatttcgttctcttatttccattctctttcataaactcggctcctcgacacgacgattgtgctaaacttctcttcatgaattggattggtgtgtgatttgaagaataatagcggttcgttgtttgttcttttttaggagtatgattgatagagtgttgttcttgttcgttgtaactactagagacttgttcaagatcgtgttgagcttgtgaatctgacgagttactgccgaaaatacggttgaagagtgatttcattgtttttgaggagtttgcacagagagtttgtgaatttatgattggccagccaactgtcagaaaaaaaaacgaaggttgccttttttgtcatgacagatgctttggttgcttattcgagagtaacaggagcagcctcatgaagagtatgatgccaagagatgattgccataattctgaatctagatgagaatgtttttgataatgaggagatgaaatttgttgtttaaggaatgaattaagggcttcaaaactcttgttgagaacatttaattgggtaaggttgatcatgagactcattttgagcgaggaaagaactttatcaatgaccaacgttcatcctgtcaactgtaagctctctttcattctccatcaaacacattgtatgttggagtatattaaaaaaaattctctccactctgtcttccaagtagtaatagtagttgtatggagagaatgaatttagcactacacaaaagtagcacttcaaactctgtcataacttggcgtctcacattcattcttttcatctcctttctttgtttctattctttacaattgacaacatttgtgagtggaacgagtcaagcagttaaaaaacacaagttgaacaagggtaacaaacaaatttccgaacctctacatgttgcgaatataaattcaacaattccatttgcaatttcagaaaagaagaagaaacattcgtcatgttttcattacagaaatagaatggcaagtggattttgcaagttgagaataaagatgaatgagaagaaggtagagaaaactttgagacgttggaaatcgttgcgtagtcgagtgaagaaaattgagaaaaagttgagcaagtggagattgttaaaatcgaaagcaaaaaacagagtcagaaaaatggttcgagtcattcatagaatttccaaaaatgtgaaatgtcaacaaaggaagaacagttgcaaacgtcgcatccacagaaagaaaaaagcgctgaaaagagctagcaagaaagctaaacgagcgatgaaacatgtgaaaaggttgaaacgtaaaatgaacaagatgactcaacgaaagaagaaatcattcacacgttatcaaaagtccatgtcacaccttcttcgagtaatgaaactttgtaaaaagagaattcaaagagtgaccacttgtaaggaagaaggaaaaagaatggcacaagctgtgaaacttcctaaaaaacttgtggatattttgagagtattggatgtcaagtttgcatgtctcaagaagaaaacgaatcgattggcttgtctctcaaagaagtgattgagttcaaagtttctaaaattgtcagctctaataaggttgattccaattaaccttcaaagcacgtggttaacaaacgattataaaattattaataattaaataaatttattccttaacatctttttctttaccctcttttgctttcttctttaatcctccaaataattttcctaaaattgatttcttctttgatttggttgttggtgtttgcgaggacgatgataaggaagataccgaactggacaaggacgacgaagatgctgatggagtttgaggtgtcgatattaaatttccagttgacattgaagaacctgtcggagttgaaatcaaactaagattcgaagaggcagatatggtggaattacttcgactgagttcagacatggaactcgaagtgtgcatgtgtggagaatctcgttttggagatttgagagctctgaaaattcttccagctcgaccactcgttctcacgactgatttcgatcctttcgacatgaattctctcttttcattcacttcttcgagagctttttcaatttcaacgacccattccattttcacttcgagtgaagaaaagaaaatttccttttcagttcttcgattcgtgtctgcattggttaaaaccatggtcaatcgattttgtccacctccactaatgtaagcatctaatagagagtatgctttaacaatttttgaaacctttgtcttttgtctcttcttttctctaaataaaatcaagtcattgaagagatacattttccattcaattcgtggattgtcaccaaagatgacttctccttcacgaaccaatcgtcgatgaggttgtaccaaatcactcaaattcatgagtttagataattgatagaccttaattctattattggtttccttaattttggaattttgtgtcgatgcagattcactcacagtttcaatggcgctcattaaatttgaataatcgccatgattttcaggtgtgtttttgaaaagattggtcaataagagtaaataacgtggaattctttgtacaggcatgatcatgaaagaaccaatttctaaaccagctgcttttggatgcattttgcgtttgtcaagccacttgtcaaatcgagtatcatgttgtcgataatctctaattttggtcatgcaactttcataagaactgagataggaagtataaattttgaaaaatggtgaaattttgataaacatgtcaccaataatcatgtcatagattttcgtaggatcatctctataaattttgaatcgttcttccaatttggaaaggaaattcttgttaaacgtcttgatcgtgagtaaatcatgagggaaaaatgatttagcaatagatttgggaacaagacgctctgattcatcaggagttttcaccttatcatgtggaaaatgattattcacaatcggatcatagaacaaatcccacaacacgtccaaatatttcacatattttcgttcactttctaaaatttcaagaaccatgttaattctttccttaattttctttgcttctttcaattctctttcgtgttcatccaataattcgtcttcttcattgtcaacatcttggtgatctgataattcttcatctaaatcttcaacactcgatcgtttttgatatgaggtcgatttgggtcgattcttcttctttttgtgtgaattggccatatgatcatggaataagggttgatccatatgaaccacttccgagtaagttctttcatttccctcctttgacaacactccaaagactcgtttctgtgaatcttcatacgatggcacagattgaggagaaatttcagcagagttcgttccaggagaatccaacgattgattctgaattgcatccaatgtaatttttggaatggcaatttgtggaacatattttggaggtgttgtactcaaatcttcagaatctgtatccgagatggtttgatcgttggtcgaaggaacagtcaattgagaggaaattgcagaatctaattgatcgtttcgatcagaatgatgattgattcgagtgggtggagtggttggtgtgtccaaagatgctgacatgtttgccagtgattgattatttcctcttggagagagattaccttcctcagccatggtatagtcagattcttgctcttcatcattgtacatttcagtggcatcggataaatctgtcaaatcgccataaggatcaagatacacattgtcttttggttttgtgacaatttccttatatcccaaggtgtcagtatttctcaatttttgaacaatggtcttactcttctcaccggtaatggcagaggcaatttcagcaattcttgaaatttctgattgtaaatagggattgttgtcatatttgaaaaatttgagacttttcaattctttcatatcttcaggaagagtcattaaacaattttcagaaatattcaactcttcaattttttccaaatgactaatggttgtaggtaagctcaataatacatttccactgaggtccatcttttctatagatttcatttccacaatttgttgaggtataaattcaaacttgttttgactaatgttaattttacgaagaggtaactgtgctaaatcaatgggtagctcatacagctgatttccatgaagatctaaatcagtaacgtttttaaatgtttcagaaaaccaagaaggtaaggttgccaagttattatttgcaactcgtaaggatgtcacatgtttgcaatcaatagcagcatatggaatggtatctaaatccaaaccagagatgtccaatgttgaagatttgtttcgaatacattcatcaatgagtttgtgaacttgacttcttttttgaattggttttgcattcaagttgaggaatgcagaatttcttcggtctcttctctgatgaggtgcttgttgattcttattgcctgtggaagtgttttgatctccttgtagtttcgtggggaagacagaagtaatggattgagactttttgtggaaatgattggtacttgaagtgagaactgaaggagtagattccatcgaagaggacaaaacattactgctcgtggagggcatgttgagatgaagaccatcatcctctccattctttgcttgatgagaatctccaacaatgctggacatggcattggatgtttgtgattcttctaaggttggatgtgtctcttcaagatggtgatgattatttgttaaaatggcatgatcatcgtgttgagtgtgttcagtgagaacagttgaagaatggtcgtcctgtggttcattctgtgaaattgataaatgttccaaatcttgaccatcaagttcttcttcatccgaatgtgcttcttcataatattcttcttcttcttcttcgtcatagagttgacgtaaaatatccgaagtcgatggaaccatcacactcgaaccagcagcattcttatgtctgctactcacatataataaatcatctcttcgatataaaaatcctcgaatgaaaccttgtaagagagacacttgatcgactcgttcttggaaataggatgctcgttctttgagtgcatggaattttctttgacatttcaatgattgaagacgagcttgaagaaggaatactcgttgccaatcactccagtagttgtgttgagaaagtgttcctttgagaatactttgaacttgtgaaagagcgtacatggtgtggcgagattgaattcgatcatgactgccacgtaggagcgattgtaaggtcacaaattgtgtcaacatcttgtttgattggatttgagaagaatggtgtcgtcgaaggaggcattgcatggaaacaatatgttcaagagattgcttgaattgttgacgagattgagtagaaatgaagcatgcgcgcacacattgaacgagtgtttggagtttggaatgatgatctcgttgttgtttcgcacggaatgcagattgtatggtatgaatggcttgaagtgagacaagtaaatgtttagagctcatttcttgtcttgctcttgattgaagttgagtaatttggtccatttggtgttgtttttcaattcgtaattttgtggatcttgccaatgattgcatcattgaaatgtcttgcaattctcgagtcatgagtattctgcaatgggtagacattaacttggatgtcaattttgataattgtgacacacaatgagtcaactctgtttgagcaatgtatcttcttgcgagtgcttgaatgagatcgatggattctttgctcctacgttgtgaacgtctttcttgaattccacgaatcattgcttgtgccattcgagtggtagaattgcatgttcgttgttcttgttgcagcacatggcttcgaatcagtgcttgaatttgaacaaggtctctcaattccaagttcaattgttggcgtgagagatgggctctaatcagagaacttaatactcgtgctcgattcaatttttgcatttgattgtgtttgtttttgaagcatctcattagacattgcaaagtgacaagtctttgaagagattgttgtaattgtttttgtgtcaatacactcttgcctcttgcttgaacacattctacagccttcatatttgcattcatagttttagaacacaaataatgtcttaccatagcttgaacagtgatggttctttcacgactcttgttgacatgcttctcttgaacgcatctacggccattgcattgtaaatgtgtgacaaatgtgagagccttgacggaattgtgacgactttgcatggctctgtactgggattgaattgctgtggacagttcatgttgaccttgtaaatactttcttgcaacaagtccgtgcaacaaagattgcaaggaaattacacgttgtaattcatgtctttgttgacgcttcacaacttgtgctcgaatgaatgcttgtaactgtgtggtgctttccatgacttgtttcaattcattttccttaattaattgtttctcttcttggagaatctttcttccaagacctcccatacataaagcttggcataattggattttcatgatctgtgtcttcaaattccgttgttcaatgaaggcacgagagcgagattgtaagagtgtgagagaattcatgagattattaaattttctgttttcaatgtagcgtcttgaaagagtattcaaaaagttcacacgtgtgaaattactatgtaattgttttctgttcaattcagcccttgatttggaagacagcatgctcaagagtgacaatttcgaatgcaaagaagaccgttcacgtttggcaacgatcaatgcctggattacttgcaacttttggatatcatgctcaacatcttggcgacactttttcgatctaacaagagcttgaacttgtgagacttgatccatcaagtttccgagtttgtttctattcttcatgtctaagaatcttctaccaagtgcttgcaatggaacaatggacttgtggatacaattttcgaattcctttctctgagatattcctctatagcatgcaccaattactgtcgaattgaatttgcttgcattgaaattcgaaaataccaaacgtttctgattcat

SEQ ID NO: 4777 - protein, 305 aa, Naegleria lovaniensis
MATVEIVNDPEDEKPFGKNSKGFSGEFTQIDSHTFETIENARQQSKAILVDDRNEYFINLSDDRIQIYDMNHHPFKIIKTLKYPLSHCNCLRTVDSAVLCSTDHSYCLVLMYEGQYRMKLMKMSVSDGSLKWETVLNKHSHICKKFLTPVMDSRGIIYVGETTASQIYVICNETGQVLEKMGTGCRKPFKTSVKWFSQLSLDRDDHLVVFCYGRNDVPLLKFFTRNLQYVKAIQLQVYLMGPIMHEPISNGYLFCGLDTLYFASREFNIISQKAMNGSQYYNHFAFSNGVLLTFETYNNKLVCYK

SEQ ID NO: 4778 - DNA, 4275 bp, Naegleria lovaniensis
  source 1..4275: mol_type = other DNA
aaaacgaatttggatgcaaaggagaagcgatgtcttgaaattttaaatcgatatctatcaagtgaaaattatggagagatgaactttttaatggggttacaatcgttgatgttcgaattgttgaatgtcatgtttgacacaaagcaaattactgtgtttccttatttttgatccatctcgtgattcctgctgatattgtttcctcaaaggttgatctttgtgacacatgcggatgtacatggactgaaccagctctaccgcgatagttttctgattcaccagcttttcaatattcatgttggaattcttgtccaatgatgattgtagagttatccatcgacataaacatactcatattccagcacgagtgaaaattgaacttttgacatgctgaacaaatgatcattcttggccatgaaatcttcattacttgtaacagaccaacttgttgttatatgtttcaaatgttaacaatactccattcgaaaatgcaaagtgattatagtactgagaaccattcatggctttttgtgaaataatattgaactctctggaagcaaagtacagcgtatcaaggccacaaaaaagatatccatttgaaattggttcgtgcatgattggtcccatcagatacacttgtaattggatggctttcacatactgtaaatttcgtgtgaaaaatttgagaaggggaacgtcattccttccataacaaaaaacaaccaagtgatcatccctgtccaaagataattgcgaaaaccatttcacggaggttttaaatggttttctacaaccagttcccatcttttctaaaacttgaccagtttcattacatatcacataaatttgtgatgctgttgtttctcctacataaatgattcctcgactatccataactggagtaagaaactttttacaaatatgagaatgcttgttcaatactgtttcccatttcaatgatccatcactgacgctcattttcatcaatttcattcgatattgaccttcatacattaaaacaagacagtaagagtgatcggttgagcataacacggcactgtcaacagtcctaagacaattacaatggctgagtggatatttcaatgttttgattattttgaaaggatgatgattcatatcataaatttgaattctatcatccgacaagtttataaaatattcattccgatcatcgacaagaatggctttagattgttgtcttgcattttctatcgtttcaaacgtatgagaatcaatttgagtgaattctccagaaaatcctttggaattcttcccaaacggtttttcatcttcaggatcgttcacaatctctactgtggccattttttttcgcgatagatttctttacaaaattaaaaagtcacacgcgttaaaaataatgaacaacaacaacacttactcggagatcacaccatactccatcaatgataacaatgattgaactctatacattgtcaaacacaaaccgatcattaataacaacaataatggataatgacaatttatctaccttgaagtcgaactataaattgactcatcatcatcttcgatgtcagtattgttatgatttgtttctttttctttgaggaagatgcgagcgattccacaaagctctcttgttatgaacatttgtttgacatcatcttcagtcataatcttgtttttacgtgaaatctttggtttggattatcattttcgggttgcattcggaaagaaatcactgctttgatgatggattttggaagtgcaaatgacatgatctcttcatcatcaaataaaagttagaacaaacaatgcttctgatagcattttcttcaaaaatacgaattactgaattgatgtctgatggtgtgaattttatatcggtaagaagatagtcatagagaagatgaagatcagaattcgtttcgtgggtgtaagttgatgtggattggttgtctagctccacatttgaattcatttcgttcaaggataacatgccaaggcttgtccggaattgttgttgttgctttgcatttttatttttaacaatttttctcgttttaaagccaaaaacatccggattctggaggattctggatttccacaaagtttgggaagtcagcaggagctggcagccgtccttttcggctgtttgctgcggctgcaggtttgaaagggccctcattcaaccaaatggggctcaggaggtgccgaaagaattggaagattgtgttgcgcgtatgacaagttgcaatcgaagtggttttaaccagcatacaatgaagcattgtcgacacaatacaacaacaagcaaattacgaacaatgaacaccgtgatacacaagctttgaaggttccaaggtcaagctttactccattcttagagacattttttggatcctttatattcaatcagttgcaaaattatgcaggccctcttccgaaccaatgatgcccttttgagagattcaatacgaaccaatgatgccatttcctaggactcatcagactcttcatcagaagaagtatcactgtattcatcacccacccgctcgtaatcgtgatccgttccatacttctgcccctcacggcttgttattgagtagtcccttattttcaagtttcatcggttgttgttgttgttgctgccatttattagtcccttattatcatgtttcatccaaatattgttgttctcacgagttgcaaatgttctgcatgtactatttgtattttgccaaaaatcgttatgcaattccgggcggatctgcctaaagctttacaaggcatacacctctcggttggaattgaggcaagagttgttgtgcaataaagtacataaacaaaagcactcaaatgatgcatcaagaaacgttgaccctcgccaactcgccaacaaactcgctggagtattttggctcgggttaaaccactgtgtgtcactcttaatttcgtaaagattgggtgtcttaattttgtaaagaaataaagctcgatgtggaactcggaactgttctcttcttctgttaaaaaagaaaatttgatcatgaaataataatgtaaaataatattggtgtggtgggcacaattttattgttcttcctgatgattactttccatcgctggtggttgataattttcatcttgagcaagtaataattcatcatccgattccgattcactttcttcatcgtcttgcaatacttgaatttcactttcttgttggaatacatattcacccgtattctttctctcactcttgagtctcttcaaacgtctcttaccctttcgaatgtaaactcgagtcagtgttttcattcgttcaactgcttgaggatctctgaaaagtaaaccaatgaaacataatacgaggaagatgatggaaatgcaaattaaaatgacaggagaaaggaagtaagctctataggagaatccgaaattatccaatgctgtttgaacactttgattactctcttgatattttcgaatttcaaccgtgtacattaattcaacaccccatcggacaggtgacaagcaaatcaagatcaatgaataccattccttggtcattaaacgaacggttggttgaacacctccaagaagtgctgacaataaaatgtaaatcacaccaacaaattcagcatgagttctttgaacaaacactgaaatgaaatatcccaaagtgctgaacacaatttcatataaaaggaagagaccataataagtgtaaaattcagcttcaggattcaccaaaatataccaaaaggtgacaaagaccaatggataaatcaagagtgatggaatttcacctgtcaattttcctaaaaagtaactcatcttgttaataccattctctgcttcacgtcgatacaaatccttatcagctccaaaacatttcaatgacgattgcatggctgcaatagcaatggcagatactgtaatgatactcattggagcaattcgatcaactcttggcaatgaacattgattactaataaaggtaggacataatttttgaagagtgtcactcattggtccttggaaatccatattgaaataaaaggcaccaataattgtagccaaaatgaaatggaaaaagaaatcaaagaacactcccttgtagtgacgagttaattgaagcaatgcacgaagtgagaacaataaatattgacccaagaatccaatgggttttcgttgacgttcacgagcaacttcactattgacaagaacttgttgtggatcaatgacttgagcaccgacttcttcttcatc

SEQ ID NO: 4779 - DNA, 4863 bp, Naegleria lovaniensis
  source 1..4863: mol_type = other DNA
ttacctctactgtatcgataacttttccagaaacatggaccaattctgaccattaccagaaaatgattatgaaacttggtcaattaagtccatccaaacccttaccgttaagacaagcacaaccatcatcgaacaagtccaatgtatcaacgactccaggagaaccttattcacagtcggaagaggatttaattgtgacatccttgcggaagggaatgaatttggaacaaatttaccgagattactttacacaccgaacatttcagtcgctgaaaaataaggttcgacggttaagaaaaaggcaactctatcacaaacagcaaccaacgaagaagagattgaataagagaaggatggttcctaaaaccactgcttcgactgattcaagggagttaagaaaaccgttttggcatgatgatacggttgatcgtttgaacaagacttgtcccgtgtcatgttttgccaagaatggtacgaaaataccgacccaaagttggtttaccctctccgttcgccaacgatgtccatccacaaaaccacctccgagcaagaaggaattggtagaaaaagtgtggagtaaatcagaaacttggaaaaagacgccatgtaagtgtggaaattccaaggttaaaaggacagtctgctcgttcaacggacgcaagtttgggtcagaaaagaagaagcttgttcaggaattcaaggaagtatctgcgttggaggagtctttaacaatgcttcaagagaacgaagtgagttcatccacgactgctgagaatgaagtgagttcatctgtgactgctgtgaacgaagtgaattcatccactactgcagagaatgaagtgaattcatctatgactgctgagaatggagtcaattcatccactactgctgagaatgaagtgagttcatctatgactgctgagaatggagtcaattcctccactactgcggaatcaaaggaaaaagctgatgacactatcgagaaattgctaaaacaaatttacacctccttctcaatctcaaacgaagacaattattttgtgagaacaaagaaagtgagattgaaactcacctcagaacaaaagaaggtctttgaaagatttttcttcaattctaaccatgcttataacgaagcatgtctcctctatttcatgttagagcaaaacaagggaaaaacactccttaccaccacagaagacgattactttaaaattttgaagaatccccaaaccaacctgagattcaaacaaactaggtggctatgggatcaagagttgaaacattgtccagcagatattaaattgaacgctgtgaaagactttgtcaaggctgagaaaattactagatataaaaacaaacaagcagcagaaaaggaatccaaagaggctgctcgaaaggccaaaaaccaattttttaaagatgttcaaaaaggaaagaaggagatgattactgatgaggaaatgaacgaaagatttaatcccaaacattttactcgacaacctcgtgaattcgaaatgaaaggacgaagcaatcaacatccatatcagtcgttcaaggtgacaaacatttcattatcacaggaaggagtgttgttaaaacctaccttttttaaagggaatgaaagtgcatgtccttccaagaaatctacggatcatcttttgaaattttattatcctgcaagagcacgaaagtggttaaaggaagagattggtatgtatatatatgtatttcgattttacttacatgtgatttgaatcccttacatgaatgtgattgattcatgtgattggaacttttctgaattctaatttttccatgatccgtctgcccatcgcctacccaaacaacaagacaacaaaaaattttcacacgagacaacctttgtacgagaaagaggtagatattttgtttgccttccagtccgttatcacaaagctttaactcgacaagaataccaacggtttgataaaagcttttacgagtccaattcgaacagtggaattgaatatgacacgatatttctcaagaactgcccacaaccttctcaagatgaactcagaaaggaatacattgcattggatccaggtgttcgatgcttcatgtatggttatgatagtaatggagacgcgttggaatttgccgctcaaggagaaaacaccatactcttttccctttctctaaagcaagatcagcttaggtcggaaattgccaagaacaaatttctaaaatacaattctcggcaggaacgaaaattttataagggtttaagaaaagccttaaaaaagaagattagaaggctggaaagcaaaattagaaataaggtgaatgatatgcataacaaaattattgactatttaactttccactattctgaaattataatacctgaatttaatgtcaaggccatgattgctagaaaacaaaaacaaaggaagcgtcaaggaaaagaagataccacgtgtcaaggacaagaaggttatactaatggccaaacggagaatatggatgtgcgaacagaacctcttgttgcatcgtcttcaccattcgaaggatgggaatcaagggacaccaccacaagtgaaaccaccaccaacacttccgaacgggttggaagaaaaattactagaaaaactgttcgccaaatgttgcgatttagacactatgattttcgaatgaaactcttgcaaaaggcagaaatgcgtggatgcaaggtacatgttgtcacagaacaatatacatcgaaaacgtgtggaaaatgttcagtgatcaaggaagacctttatggaagcaaatggtttcattgcaatcattgtcacttccacatccctcgtgacggtaatggagcaagaaatattttgatcaagaattaccatcatttattacattggtaagttgaagagacaactaaaatgatacatcattcgggccatagatctatataataataactatgtgattatcattctgtcaagatgataattccgtctctcgtgtgagagatgagtatgtgatcggagcactttaaaacaccaaaaaatcattgttatcattgatggagtatggtgtgctctccgagtaagttgttgttgttgttcattatttttaacgcgtgtgactttttaattttgtaaaatatgatgtaaaataatttagacaataatattcatatgaatttaatacaatatatactggaacagactcacaaataatccaaattcgaatagtcatccatatgtgctcgatgatgagaaccagggacaccgttggacgcacttcgactgtttttcgagtccattaaggaattcacaatttcatcatccttactcatgtacgaactaaatcgtttgtgatgttgtaaggcatgttgtaaactttcaatcttgaatgcttgatctttgagagtggcattttctttttgttccaccgtttcatctgattctgctctttccaaagtcatggaacgaagcgttggaaagaaggtaatgtattgtttgttggccaactctgccacgtattgttcaataccagtatattcgctgggatccttattttctaaataaattaaataaaagacataattccacatgttgtgttcgtgtttgatgtgaccttcgaaactaatgccttcattggctcgaacgtcaaatcgtgactttttgtgtgaacaaataaagcaacatccagtcttttcttgttccaattctgctttttcttctcttctttcgctaaaactgtcaagcacaataccaaagacaacgttcactaacaaaatgataatcagtagtgaaaagtacaagtcaataaagatacgaggtacatcaagaggatactgttgatggcaattggtaaattaaaatttgagaataaaataaaagaagaacaacacacttacagcatcagtaatatcttcccaaaaaccaccacctctcaatccatagttgagaatggacatgaaacatgtcaaagtttctgtacacacaatggtattgttgaacttgaattggtcatatttgaagctaaacatcaagaaggtgtgtaacaataccgagaagagtgtcaatacggcagtgtatagtaacttttcatagttttgaccgatagcaagaataatgtcaagcaatccatcgggtgaaagagctataatttcaaacgtcaagacaatatatgcaagaggcgtcacaaatattccaatcacaatcacccagaagaataaaataattctccaaatatatgggtcttgtaaagcatacagtaaaaagttataaatgaaacggttcgttttggtaatatcgttccaattttcatcctttttcagcttaaatttcttcttaatattcaaagtgaggaagaaatacaaatagatggcagaaagaccaatattcaaccctagcaaaatgagccctaacgtttcaacaatgattccaatagctaaataattataattgtttcgatagagtgggctctgagtagtcaatggcactcctggtacaatgacaggtccagaaatgacatcaaattgttttgtgtacgttgcaagaactaaaatgttaatcacaacggccagtaagaagacaccaagtcgaatatgataccagtacttttcagtgagcttccaaccacgtgcattgaaactatttggattgtccatgagattcttcaagtgagccatttccacacgagcgatttggtaggtccaatcgaagagggatttcacttttgtttgaggtgagcttctatcacacgcctcaacaaattcgtctttggtggtttcttgtaaatgcctacaacgtttcaaaaccttgaaatgcaccttttccaacacattgtcacgaacaacttcaatcgttccaacctttgtgttgt

SEQ ID NO: 4780 - DNA, 5184 bp, Naegleria lovaniensis
  source 1..5184: mol_type = other DNA
ttttgaaaagaactaactgctgaaaaattgaataaaaatttgaggaaattttccataaatccacagaaacaagccacaacaaagaaagctgaggattgaactgaaatacttgaaagagcactcaaaatggccaacaatcgttttccaaataaattacatttgctaaagttgttcactttcaccaatccgtgattaagtttcaaatcaagagttatagaaatcatgtcacgtgcttttggatagagtattaaaaaggaaatcatgatagatagtacagaaaatatgatacacaatacaatgtgagcatatcgatgtgtgaaatggaagagaaatttttggtaaaaatcatcacattgaaatgcaaaatattgttcgttcgaattttgataattgcaccaacaagtgaagggtacatcgagaggagggatgattatatctggtggttggtgatgttgttgaatcgagcgagtagttgacatgtcatattctcgactcattggatttacatatttagaaaaataaaattgaaataatgtttcaagtttcacttctctcaaagcatctccaaaggtcaaactttcattttccattcgtctatatttcaaaaaattaatttggaaataaggcgttaataaaaagttaaaatcaaaaagtcccaaatgacgtttcaatgtcaaatgattttcatcattcgatggatgagatgatttagaatatggtacattattgcaatgtacttgactccacaatgtaaattcatttcttgtaaataatgaacaatttccctgttgaagagcttttctaaattcattcgattgactttgattacaatataaacaataattaatggtcgatcccaattccatgatttgtgacttgtttctcaaattccaagtgaaggttgactcacacaaatagtttgtacaaaaagaatcatcatgatgaatagtatgaggagtagtagtggtgctacaaaaatcgtgatattgaacatcaaagggaaagagcatgggatagtaaaattgattcaccggtaacaggtccatcacttcatttctcggatacaagacttgatggagtatgattgggagtgttgttgttggtgttgaatgattcgtgcttgtcatactgttggaagaaggaactggttgtgtgaaagtgatgttggatgatgatgttgttgtgaatgataacgatgatgatgatgaatttacttgttccaacaagatgagaagaatcatgtatgacgtgaaaagaggtaacactcgatgttggagtatactcctggaagagagctggatcatgtcaacgggcatttgtttgtgtgtacgaattgaattggggccaaatctcatttcgtctgatttcacatccatgggcgtaagttccattggactattttcgcaaggacgaaatggagattacaaaatgatgatggaagggcaacaagagaatctaccgttgaagccaaatgaacaattacagcaatttctttcaaaaaccatcactaaaacacagtcctgatgacgcaattaataaccttgtttgttttggaggttttgttataataaacggtttcaaatttgtcagcactaaaataaaagaacaaaagccacaatttattacaaactcaacaagtcaatataatcatcaacagtcagttcctgacgaaccatttattcattctttgaatcaaaagtgttgttttggaggtggataaggaattgtcaaagcgttcacttttccatgatcagttcggacgaaaagaatgaatcaagttattcaaattgatagagtttcaattcaataagtcattcaatactgataaagtttcaactcttgttgaggttatcaaaaaaaaactcaacaacaaccttaatctcaaacaatgaagagaagtagagaggatgaacctactcatcctcctactaatccatctcttgcacacagcatcattccattctgggatgagtactcacaacaagtatcggataaactttgggcatgttcaagagattcctttcatgagtttaatcaatacaacaacaagggatgcactgacggacggttcaacttttctcaattcactgtgattgaatccaagccagtgtttgatgttccactcaatgttcatcactctataacagagaatgtggcttttgattcttctttgccatctagagctgaggtggcattttagagttatcacctcagctcaagaaggcaaagaagaatcaaaaggcggcccaaaaatttcaagcagacaaatccttgaaaattcgtctctaccccaatgaacaagaaaggacaacattgaatcagtggatgggaactgctcgttggatctacaacaggtgtttagaattcaccaacaaatccaaaggtgtcaaccattattatttatgtattccacaagtactggatattaggggtgagaaccaagcccctcaacattcaggacaagttgtagcattggatccaggagtaagaacatttcagaccacctttgatttgaatggttattcaaccaaatggggctcaggaggtgcctaaagaattggtagattgtgttgcgcgtatgacaagttgcaatcgaagtggtctcaaccagaagtcagacgttgcaaaagatacaagtacaagagagcaggaagaagaattcaacaaaagattagaaatatcgtggatgatttacacaagaaactgtgtttgtggttgtgtcgaaactaccaagtgatcttacttccttcgtttaagactcagaaaatggtaaagaaactccataggagaattaatagcaagacagcaagaaaaatgttgacttggtcacattacagattcaagcaaagattgcttcacaaagctagagagcatccgtggacacacatttatattgtcaacgaagcgtacacatccaaaacttgctcatgttgtggacatgtttatacggttggatcatctgaagtgtttcgttgtccatcatgtggctcaatttttgacagagatatcaatggagccagaaatattcttcttcgattccttactactcatagaattagtttttgagcaccttgtgtgttgggtcttccccaccttgtgtgcgttgggtcctttcccctggcttgcaagatcagcactttgttcgatttgtttgttttgttcaaattgttgatttaaataaaggtgttcaatgttttatgaaagattgttagcgtcatctgcagagttcgtttcctgtttttcattttccatattggtccattctgtgatcatcattaaaaaaaaattaaaaaatgaaattcggaaaacggcttcgtgatgagatgtgtcccgagtggagactctcgtacatggattacaagttgttaaagaagctgattaaacgaatacaaaacaagttggaagaacgatatcatattgatatgcaaatgattttaaacgaggtgcctccgagtgagattggtgttccgagcgattatttggataaaccactcatttcgttttcggatgaaatggtgtatgcagttactggtcttggagaagagaaggatgaacggaattttataaattatttagaggaatataatttggaaggaatgtatttgaaaattgttccgaaggaaacatgccaattttttaatagattagaaaaggaattggacaaagtgaataagttttatatccaaacagagcgtaaattttgtgttagacatgcagagttgttgatgcagttgagcgtcggtttgactgagactctctcaaagaacgacaagcaaaaagtcagaagcgcatttcaagagcactacagagcccttttgttgttgatgaatttccgtactttaaactttcaaggtttttcgaatatcttgaaaaaggtttgttgttgcatccaaattgcatctgtagattttatcatgataaaaaatttaaatcaatgtcattacgtcatgtacagctggataaatataccaagagcaaaaccaaaagcaagctgatgaaacgagtgagagattcatattttacttcatccaaagtattggattacatgatgtcgcaaattgagtacaaatgctcagtttacatgttcaaaggcgacagaaaaaaagccaaagattttcttagacttccacaaactgtggaaaaacaaacatctccgttcaggtctggtatctcagtaggaattggaatagtgttgtctgtggcgttcgttttaacatatgtatttctttacccaagagatgaccctccgtctttttcagatgcgaccatgtatgtgtatcgattgactttggtgccgattatattggcagttttggttggtgtgaatcttcaaatttggaaaaatgcaagaattaattatgtatttatctttagatttgacccaagagatcacttatcagtgtctcaatatatcgaggtatgtttttattgcgaaaataatcttataagtaataattcattcattcgtatagatgaccatgagcctgtacaacattacaatgggaagcttaattatttacatgtactctattattacgaatacgttttatgagtatgcctatcttcatccaatatttctatttaccttcatttttatctacatgtgtttcccatacaaatggttttatggtcacagcagattatggctctttagaattattctgagattattaatggctccattcagaaaagtagaattcgcagacttttggtttgctgatcaattgacttctctttctgattttctcttcgaaattcaattcgtgtattgtgtttatccatctctgtgggttgacaaaattgattctttctgctcagactccagatcattgggtattccagttcttaacattttacccaactatattcgtttaatgcagtgtttaaggcgttacagagacagcaaaaagccccatcctcacattaccaatgcgttcaaatatctgtcaagtattattgcgactcttattgcgtttttggataagaatattgtagctcgtaagtttttttttatcaacattacatgagctaatactcttataaacagctactctacctggaagtagttggaattatatgagaactacttgggttgttgtcaacatcatcagctccacctataagctgttatgggatgttgtgatggattggtctttaatgcaatttaataaggatgctgagcac

SEQ ID NO: 4781 - protein, 172 aa, Naegleria lovaniensis
MKADREVVLTAIKHSGFAFAFVSDELRGDLEIVWTAIQSYNGAIEYASPELLRDKEVIRNAIIEFGHFPLLRYAVPELRSDKSFVMEMVKLNGIQICGVREHLNDKEILLEAVKNNGFALYYAEDALKNDPELVMEALKCNGFALQYSDALFQARMEHGYFGAFFRKPNYNN

SEQ ID NO: 4782 - protein, 230 aa, Naegleria lovaniensis
MKRSREDEPTHPPTNPSLAHSIIPFWDEYSQQVSDKLWACARDSFHEFNQYNNKGCTDGWFNFSQFSVIESKPVFDVPLNVHHSITENVAFDNSKKPPQLKKAKKNQKVAQKFQADKSLKIRLYPNEQERTTLNQWMGTARWIYNRCLEFTHNFKDVKKNKKNFRTFVVNNDNYQTENQWVVNTPYDVRDAAAIELLTAFNTNFEKKKAGTIDKFMIPSELELAIGLLLW

SEQ ID NO: 4783 - protein, 191 aa, Naegleria lovaniensis
MNHPCVQIILMDFSSHHDDSVRFENPNSSHFTICSLENLLKIKFQRQQSGKKKWLKNIELEHRSFIPIEFMNDKVFILDHLKKCRDQNFLYLPRVSLELQKDKEVLWEAIQRCGLELHYAPSELRNEKLFVLTAIKQAYETIMLASQELQNDREFVLEAVQHNGKSLRYVKDQFKGDREIVLAAVKHDAFI

SEQ ID NO: 4784 - protein, 267 aa, Naegleria lovaniensis
MNSSTTGLTTFAFAGMIGKEQIIAIRNLIRKDPLRFILIVILVISIASFFIILNSFLADQFELNHVHVQTCHVLNGNLNAHVCTDYDCNVVTNKKIQFHAPLSIQTQYYPSSTIFTPVFSRELQDQVYSKSGDWIEKPLNEACTSGVSTCYAPSWQVQLMHETIPSQLLSGFITTNLEKAQQVLNQPLLHVKYFCFLNYFNDLTWFPSSTSYIPTLTFALLMTSVGMGLFSVVALRILRCYRRCTEQRNEKKVEEGEHASLVVKINE

SEQ ID NO: 4785 - DNA, 5021 bp, Naegleria lovaniensis
  source 1..5021: mol_type = other DNA
ttcctatgatattagtgtcttacctgagaatgaagaaggtcatgaaggagtatcattggagaaggtgaaagaaattattgaatccgaagattatgtcgaacaattacataatagttcattgtctcctttggctaatactttcttgtgttatgccattttgcaagataagggatttagaaattatgcagcaagtggatgggcatctcttcgtgctgcttgggtctgtgacgatggagtcatccatgacaagttcaatgaagagaaacatttggacaatgctgtgaaatgtagaaagaaggcaatttattggtttgaaaagtgtcgttcattatcagtaccttttgtccaacaaaacggaacagaagaaatgattttaactgatctcttcagaagatgtagaatgtgggaagatgctgaaaaggaacttcaacgagcacaagtctttaaggatgaaattgatgactttgtttggaaattaattgaatatgaaatgtatttggtgaagaagcaagacactgaatgccacaaggtcagtgatgcacaactgaactttaataaggacggcgactccactgtcaccaatgagaacaatactgctcctcgaagtagtagggattgaacatgattctttagaattcatcaaaactccaaattacctttaagaaaagcagtttgtttataaactttcagcaaaatcgatcaaccaaactattaccattcgatttgtggaatcagaatggatattcatgtattagcaactgcgttcagttattataattaggtttcctaaaaaatgctccaaaataaccatgttccattcttgcttgaaataatgcgtcgctatactgtagagcaaaaccattacatttaagagcttccataactaattctggatcgttcttcaaagcatcttctgcataataaagagcaaagccattgtttttcacagcctccaacaatatttccttgtcgttcaaatgctcacgaacaccacagatttgaataccatttagcttgaccatttccattacaaatgatttgtctgagcgtaattctggaactgcatatcggagaagtgggaaatgtccaaactcgataatggcattccgtatgacttctttgtctcttaataactctggtgaggcatattcaatagcaccgttgtaactttggatagctgtccatacaatttctagatctcctctaagctcgtctgaaacaaaggcaaaagcaaaaccgctatgtttgatagcagtcaatacaacctctctgtcagctttcattcgtgcagacgcatgatgtatgaaataaccttcccttgacactgcacacaaagtaacttctttgtcatcctgcagttcttcagatacatagcaataagctcgtggtcttgttcgatcgccaacaatgcaatttccttgtcatttctcaagtcatcggatgcaaattcaagtatgttgccgttgaagccaaaagaacaattacagcaatttctttcaaaaaccatcagtaaaacacagtcctgatgacgcaagggtttattaataaccttgtttgttttggaggttttgtttttttaatcggttttaaattactcagcactaaaataaaagagaatttattacaaacacaacaagtcatttttatcatcaactgtcagttcctgacgaaccatttattcattctttgaatcaaaagtgttgttttggaggtggataaggaattgtcaaggcgttcacttttccatgatcagttcggacgaaaagaatgaatcaagttattcaaattgatagagtttcaattcaatgagtcattcaatactgatagagtttcaactcttgttgaggttatcaaaaaaaaaactcaacaacaaccttaatctcaacgaatgaagagaagtagagaggatgaacctactcatcctcctactaatccatctcttgcacacagcatcattccattctgggatgagtactcacaacaagtatcggataagctttgggcatgtgctagagattcctttcatgagtttaatcagtacaacaacaagggatgcactgacggatggttcaacttttctcaattcagtgtgattgaatcaaagccagtgtttgatgttccactcaatgtccatcactctataacagagaatgtggcttttgataactctaaaaagccacctcagctcaagaaagcaaaaaagaatcaaaaggtggcccaaaaatttcaagcagacaaatcattgaaaatccgactctaccccaatgaacaagaaaggacaacattgaatcagtggatgggaactgctcgttggatctacaacaggtgtttagaatttacacacaacttcaaagatgtcaagaaaaataagaagaatttcagaacgtttgtggtgaacaacgataattatcagacagaaaatcagtgggttgtgaatactccttatgacgtaagagatgctgccgctattgaattgttgactgctttcaacactaattttgaaaagaagaaggctggaacgattgacaagttcatgatcccttcagaactagagctagctataggtctattgctatggtgaccttgatcagtactcttactggcggttggtttactactatgtgatggatccatgttgttggtaggtaatgatagacacaaagattgcttcacaaagctagagagcatccgtggacacacatttatattgtcaacgaagcgtacacatccaaaacttgctcatgttgtggacatgtttatacagttggatcatcggaagtgtttcgttgtccatcatgtggctcaatttttgacagagatatcaatggagccagaaatattcttcttcgattccttactactcatggaattagtttttgagcaccttgtgtgttgggtcttccccaccttgtgtgcgttgggtcctttcccctggctttcactctttgagtgtttgcttgcaagatcagcactttgttcgatttgtttgttttgttcaaattgttgatttaaataaaggcgtcatgtttcacagcagcaagtacaatttcacgatcacccttaaattggtccttcacataacggagtgattttccattatgttgaactgcttccaacacaaactctcgatcgttctgtaattcttgagaggccaacatgatggtttcgtaagcttgcttaatagccgtgagcacgaataatttctcatttcgtaattcggaaggagcataatgcaattctaagccacaccgctgaattgcttcccatagaacctctttgtctttttgtaattccaatgatactctgggtaaataaagaaaattttgatcccgacactttttcaaatgatccaagataaatactttgtcgttcatgaactcgattggaatgaaggatctatgttctaattcaatgttctttaaccatttcttctttcccgattgttgtcgttgaaatttaattttaagcaaattctccaaactgcaaatcgtaaagtgagaagaatttgggttttcaaatcggacggaatcatcatggtgagaagaaaaatccatcaatattatttgaacacaaggatgattcatggtgttgttgttattgtgcaaaaattcagtaatcatcatcagcctttagtaagtattcattaaattttgtttataataataataataaattgaacgatgagaacattaaatatcgcgaggtggaaccttcctcatattggaaaatgatcttcgaatacgggtttgaagtaacactcttttcctttgtattgatacctattacaatattttacaaatcatccatccgtttttctattttttaattgttgaatgttccacattgaatgagctccttttattattattgctaccaaattatcattcattaattttcacaaccaagcttgcatgctctccttcttccaccttcttctcgtttctctgttctgtacatcttcgataacatctcaaaattctcaatgccaccacactaaagagtcccatgccaacacttgtcatcaacaatgcaaacgtcaaggttggaatataactcgtcgagctaggaaaccatgtcaaatcattgaaataattcaaaaaacaaaagtatttgacatgaagtaaaggttgattcaacacttgttgtgctttttcgagattagtggttataaaaccagacaacaattgagaaggaatggtttcatgcatcaattgaacctgccatgacggagcataacatgtactgacaccactcgtacatgcttcattcaatggtttttcaatccaatctcctgatttggaatagacttgatcttgcaactcacgagagaagactggtgtgaaaattgtacttgagggatagtattgagtttggatggataagggagcgtggaactgaatctttttgttggtaacaacgttgcaatcgtaatcggtacaaacatgtgcattcaaatttccattcaacacgtgacaggtttgaacatggacatgattcaattcgaattgatctgccaagaatgagttcaagatgataaaaaacgaagcaatggaaataacgagaataacaatcaagatgaaacgtaagggatccttgcgaatcaaattacgaatggcaataatttgttcttttccaatcattccggcaaaggcaaaggtggtcagtcctgtagtagatgaattcatgaagttgagttttttccttggtgaaattttagtgaaatgctgaaatgcatttggttgtgtgagtttgagttggaaacgagttggaaatgcagaaattacggagttattgaatgaatttcagctaaaacaccgcctttttttttcgtacaaaccttgtttcattgagttatgatgttacaggatttatggacacattggaaagccggtagaactggccaagttcaccacaagtttttttgaattggatttcgcacatataacttgagtttccaaatctatccccaatggaaatactcatggatctgtgttcacatgtcaaaaattgtacaagttttt

SEQ ID NO: 4786 - protein, 128 aa, Naegleria lovaniensis
MNDRRQSRVDHIKLREGTRGKPLQPNIKTDRLENRENYVKRWTIPFTLEDSNKFLSCFLAMSVFALPTLHDYWENPTLNNLGLGLFFQNRLPKHKFLEMYRCIDIDVDDWLDSIKEKAQSIWDVSTNV

SEQ ID NO: 4787 - protein, 172 aa, Naegleria lovaniensis
MKRSREDEPTHPPTNPSLAHSIIPFWDEYSQQVSDKLWACSRDSFHEFNQYNNKGCTDGWFNFSQFTVIESKPVFDVPLNIHHSITENVAFDNSKKPPQLKKAKKNQKTPQKLQADKSMKIRLYPNEQERTTLNQWMGTARWIYNKCLEFTCFYIVNNNKSLELIGGKLMGL

SEQ ID NO: 4788 - DNA, 4341 bp, Naegleria lovaniensis
  source 1..4341: mol_type = other DNA
gcgtcaggagtcagtcatcagcacacaaccataatattagtgttctacatggtgagtaacacttcatatatcaatttgagatacacctgatcagtatttattgaaaaagagctatatttcatattttcgctggacctctctatcattttgaacttggaatttttgagtgcaaaatatttttaaaaaaaatttacaagtcctcaaaaaccttgtgttccaatttcattgcttctctctggttttacagtttgaaataccagtccgataataaataatcatcctctcttcatttacaacattaaaattttttttgggccaatttaccttcaaaattcagagtgaaataactcaacaaccacttcacatctcttagaaatttcaacaccattagaaagcaaatgaaaattagcctaggatttgagtatatctcgtcctcagcagttaacttcggaccgtggacaggacttattgaaatcaaaatttttttttgatagtaaagtcgttaaaatggctcaaaaaaaagagtaggtggagccaaaccctctttcataatgaggattaatcactctttgaaatggtaagtctttaggttcctcactcgttctcttatgcaacatccaattgaatatatatccactttcacaggctgccgtaaataatttcattccgtgtggatgaggttttctaggaatgaaaacatgatgaggacattttcttcctttgtgaggaatcattgactcgtcgagttaaacgtttgttgatacatcccaaatactttgagctttctctttaatggaatccaaccaatcatcgacatcaatgtcaatacatcgatacatttccaaaaatttatgtttaggtaatctattttgaaagaacaatccaagccctaaattattcaacgttggattttcccaatagtcgtgcaatgttggcaatgcaaacacactcattgctaaaaagcatgataggaatttatttgagtcctctaatgtaaatggaatagtccaacgtttgacataattttctctattttccaaacgatctgttttgatgttaggttgtaagggttttcctctagttccttctcgcaattttatatgatcaactcgtgattgccttctatcgttcattttagagagaaatttttcctgtatatcgtcagtgaatattaatttaaagcaagagagtggtgttatttcggaaagtactccaataaatttgcctttgctctgatttttggcgtaataatcgtcaggcacaacagtaatcccgttacttggaatatatttctctttgtttgactttgattcatggtcgtccaatgacaaatatgagagcaaaattccaagttcaatattatcatcaccatcatcatcataaaaatatgaatcccaattcaactcttcataatcatcgattaggattggaattttctcttcctgaggcaaataattaaaaatacaatctaaacatccacccgaatcaagctgatgaaatgttgttgtaacaccatagccagtgttgtcttggcttggattgggtttgttttggaggttttgtttttataatcggttttaaattactcagcactaaaataaaagagcaaaagccacaaattattacaaattcaacaagtaaatataatcatcaacagtcagttcctgacgaaccattcattcattctttgaatcaaaagtgttgttttggaggtggataaggaattgtcaaggcgttcacttttccatgatcagttcggacgaaaagaatgaatcaagttattcaaattgatagagtttcaattcaatgagtcattcaatactgatagagtttcaactcttgttgaggttatcaaaaaaaaaactcaacaacaaccttaatctcaacgaatgaagagaagtagagaggatgaacctactcatcctcctactaatccatctcttgcacacagcatcattccattctgggatgagtactcacaacaagtatcggataagctttgggcatgttcaagagattcctttcatgagtttaatcagtacaacaacaagggatgcactgacggatggttcaacttttctcaattcactgtaattgaatccaagccagtgtttgatgttccactcaatattcatcactctataacagagaatgtggcttttgataactctaaaaagccacctcagctcaagaaagcaaaaaagaatcaaaagacgccccaaaaattgcaagcagacaaatcgatgaaaattcgtctctaccccaatgaacaagaaaggacaacattgaatcagtggatgggaactgctcgttggatctacaacaagtgtttagaattcacctgtttctacattgtaaacaacaacaagagtttggaattaattggaggaaaactaatgggtttgtgactcgccaaacatccatcctttggaaaaggattggtgtttgagggattttctgcatattttgtcattagactttattgagcaaggggtgaagcaaagcaaagggagacgaagtactagtatgcagaaaattttttgagcatgaaaattatttcgaatactcaacccaaactcttttattgtttacaatcgaaacattcctgcccttcactacgttcagaacaaatcagcatcaacatcgtatctcgtcaacatcaagcaaaatcgttttcgggaagaaacgcatcaatgtcgctcatttcgatctcgaaaaaaatcgcgaaaaaatcgtcgattttttatttgcactttttcgaaaatcacatgaagaagagatggattgtgatcagctcatattatcataaataaaccaggtgtcaaaggtggtgacaatgtcacattaatgtaaaattaataataaaataaattaaggttataaaaataaatattcaactacttgtcgaaaagattcgaacaaggcagtcccgcactgtcataatgtccttccttaccccaagaacattaaggatcagcgaaaaaggaacttgaaaagcttaagaaagcatgataagggtgggagtgcgatgggtgggaagtcactaagcaaagcaatgagagacgaagctcgagtatgcagaaaattttttgagcataaaaatttttgagaatgctcaaccaaactcatttattgtttacaatcgaaacattcctgccctatgtttggcgagttacaaacccattagttttcctccaattaattccaaactcttgttgttgtttacaatgtagaaacatattcgtgcaaagtcgaaaaaatcgattacgatcgacctgaatcgattacctcaacacgattcatttctcaacgtcgatgtttttcgtccaaaatcgaaaaaatcaattatgatcgacctgaatcgattttcttgatcgtcagagttgaaaaaatcgatcatgaagaacctttaatcaaataaactctgataatttgcttctatttgatttttctcctcttcctctttttgtctaatcttctctttctttacctcaatcaattttgcaacttcattcaccaatttggtcaaaggttttacatactgttcctcttgttttgcaatatcttcttcttgttttttaaatctctcaagtaactcctccttttctttctgaattttcaataattgatctgcaataacttttgaattattttcttccatgtctttcatagtttttaaaaactttgtcgaattttgcatatccttatcattagtatcacagtcttgtttagcgttaataaaaatttgcttctttaactgatccaatttgaaaatctggaattctaaaacaggtgatttgaacgtagtaacttgtggtgttgactcaggttttggatcaagatcaaacatatcatgcaaatccatgccacatatatcaagctcaggagccattgaaggtgtttccttggtctttgactcgtccaattctttcttaatgaccaatgatttttcttgaatagaacttactcgatagttggctcgatgcaatagaacgagagtgattgtcaatacagatggagtgactgctctttatgctgcttgttgggagggaaataaagaagctgtgaaactcttattaagagtaccagacattgatgtcaacaggaaattgaagtatggtctcggcactgcatatatttgatttgtgtggcaagtcctaaagtcaaaagtgaagaattacaaacactcacctgcagtcaaggtattgacatcgaccaaaaatacgagataactcaattcagagtcagaatttttgataagcttgtcactagttttcaaacttcgaattacttgcaaagcatcttcaagcattgtttgttcaatatttgcataggttgtga

SEQ ID NO: 4789 - protein, 185 aa, Naegleria lovaniensis
MARSKKKFGTSTYDSDEYSTTASRTYSKRVFRKTVRDVVSQTGKTIVADVDQVPHRARRRWKKGIFTSEREMVNHMDVKSKHQELHEFMHAKEESKNNLKTAQQKVKFEAWCESKPAHVVKKTLKKLEREGKETIFDADSTDSEIEKKVEQWVSRNYMQSIGETKRYLETESLQCFSEYRSWKNK

SEQ ID NO: 4790 - DNA, 4155 bp, Naegleria lovaniensis
  source 1..4155: mol_type = other DNA
tggaattccacaattactgaaactgttcaactgcacaaacggttggaagagcatgttcagatattgtgtttcaattccctttccatgatcaataactttaaactcaaaccattgtcgagaggatgaacactttttacccacaacaggattcacatgatgatcattagtagttgtggcttgcttgcttagaccacatctcaaagtgatggtctggcctttctttgatgcttttgcagcattactgagcaaattgatcaaacattgttgaagactggattgacttccatgaaccagcaagttctcaccaatgtcttcactcaattctagctcaacatgtacttttagtggtttacaataacctctgataatgttatagatggtgcgtaaacatgaggctaattcaaaatctaaggtcatcatatctgattgagagtgtctgcgattgttgtttggttgatgtgtggaaatattctctgttcttgcaaaatgtaagatatcctcaatcacactcaaaatcattccattggagcattccacattttccaagagctccttttgttctgcagtcaaggaattggtgtccttcaataattcaatacttcccaaactcgataagcatacagttctgaactcgtgtgaaatgttggaaatgaacttttctcgtgtttgcaaggcgttggataattgttcactggcaacactgagctgatctacctttccattgagacattccgtgaatgaaacaatatacaaagaaaagatcaacatggaaagtatacatggaaaacattcggatatcagaggcatacactcattgtacatgaatgaaaatccatccatcgtgttcgaggaatttcgagaatagtggacccacgacaacagcaatcgatagaaaatacgtcccagatagtgcgtaacgaaatagaaaggaacaatgattctccacaaagagttgttcatcctagaggtgcttccaataatcatgagtttcaagggcagtaacagcatggtgtgtgttttgaaaaagaaaaaccgaatgctgaacaggaacagacttagaaccacgttaacggtctgtacattggaggtggtcaactcgttggaagaacagagccaacgtataagaagttttttgacactgacagagagtgcattgaggattctgaatctcttgacaacatttttaaataggtccacgctaaacgagtaccctgtaaatagagtgagcaagagaacaattgttttgcaaacgccattgttcatgaaggagtgcaaccccacaagaaagtaatctaaaagaacaccatattttacaagaataagctgaacatttaacatttgtttccatttctgggtatttggattcaacgaagaaaattccgaaaaatccttttcaaagtgctgacactcagtcatggaggatcttctttgggactcatcattctttctaacgggcaggtaatttgatgaagtgtctgtggacaatgtatgtgtgtggtgatgcattgttccatgttggttgagcgaaaggagtggcgagttgttgtcaaacatggattgttttttttaaagtgctcgaagggctgattcgctcaactcaacgcacttatgcatcaaaacattgtgttaacattcaccaaaaagagtatcctgtggggacaagacgacgatcatttgttcagaactgtttttggtgcacctacattttaacacaagcgtccaatctaacatggaacttagatattaaccgacatgttatcccaatctcgattgaggctcaaacttgttaagcttcttaaaaaaggcaattaaaaaacgattcaacactttgtttaaattcaatcattcgctaaaacagggagtttggtttcacacaacaaacaatgagagtatcccatctgaattaccatatttcaatgcaaacggattggtcgtaacagcttatcttttcttaatgaaggacttttgattttcataccccaagctttaaatagtgcaaggttcacctcgtctctgaacactacacttcaaaaacgtgttccgagtgtggtcgtgtgaattggcagcttggaggtagtcacgtgtttcagtgttcgaatcgagcgtgtgcctttacccttgcccgtgattggaatggcagtaagaacatcttcctcatgaatcaacaccaattgaacgaggagccacaagattagccaccaaagaaacacaaacaacacgattacatggagatgaaccagtcacagagtgacgacttggaaacactcgacgtgtccatgttgagtgagtaacgaccacaccaatgtgtgtacaagaaccaccatccctcgcacactcatgtgtgtgtgtagggctgtagagtaggcaagctttagcctcggcatcgaatattccccttatagggtactccctacatttggatgtgaaataaagctgatagttgtgcttctgaagggatggaacttgtaagaattaaattgttgatcaatttgctgagaagagaaaatgtttgcagtccatgatggagaaaggagtgagcgagagaacaggctgttcttaaaaattattcataatcttggaggcagccaaagagcgagccttcatttcttctcttttgatatttttcgaaaagatttaaattttagatcaatttcaatagattggagatgcataagttttgaatggaacattgccgaatcattggtagagcaaaaagagcatgcgttgtttcttctctcatattttgggatactatagccacaacatttccactgaaatcgatcacaacaacttacaaagggttaatatgaacaaattgaataataacacagtgtactttatggtgacgaatggtatttccattcatgctccattttctacaagctttacttgttcttccatgatctatattcagaaaagcattgtagactttcagtctctaaatatcttttcgtttctccaatgctttgcatataatttctgctcacccattgttcaacttttttctcaatttcgctatctgtactatccgcatcaaaaattgtttcttttccttctcgttctagttttttaagtgtcctatatatgagattaaggtgtattgtaatgtcaaatcatgatcgtttttttcgtagacaagtgaacaataacacaaatttcatcaatatatgattccatgggattggtgaatcaatccatgacttactttttcacaacatgagctggttttgattcacaccacgcctcaaatttcactttttgctgagctgttttgagattgtttttagattcttccttagcatgcataaattcatgcaactcttgatgtttactcttcacatccatgtgattgaccatttctctttctgaggtgaaaattcccttcttccatcttcgtcttgctcgatgtggcacttgatccacgtcggcaacgatggtctttcctgtttgagaaaccacatctcggaccgtttttctaaatactctcttcgaataggttcgactcgctgtcgttgagtattcatcgctgtcgtaggtgctggttccgaatttctttttacttcttgccatgatggttaactttgcggaagatgaagaattcgatgacaagaaatgagatgtgatttgatcctttttgttctattttttgcttgtcagatcaagaagagagacaaaccattcaagaattgcacacgcggctcacgacggatgaatgtttcccaagctccattaaagttaaaaatatttataaatctacaacaacaacaacaacaccatcaactctcgcatacaacaaccacgatattgatgatcagtactcttttgttaagcaatttcaatttcacacacgacaatatcttgcttgttagtggaaagacgaatggtggattgcattctcttttcatcctttctcatgtaattggtaaagaacgtacacaatactgttgttccacctgttaaattctgtgtatgacttgcaaaataattggtggttgctttgtagattcctttttgtgcttttttcaacatgtattcttctggcccataaccttgacgaaaatctcttgaaacgtaaccacccattctagttcgattgtgagcatagtaagcatgttcgccatgaggagatggttcttcgacatgtaaatcaatatc

SEQ ID NO: 4791 - protein, 391 aa, Naegleria lovaniensis
MYPSVVDLPTCDTTTDPHALNSNGNQSTQPISHQHVLSNHSSIRNKRFETNSSDVVATKNPPSTNPLHSSFQNSLTFHDVSQNSTLFHDTFDPLLLMSLVETLQMHSEETHRWKQSISEHIQHMDMKMSAILNFIKKNQVHSSLKESQINNQYSIMMSQDHDPNILHVNSPEVLLNTTLKSPVQNDDKGYHHPHAIRDLNESRRQLTQYSQPSATLNPYSYNQALDGTFCTSVQDSNSLDQKNYNGPFVTTCQATTTVTACIVPPPQSPPQVIPTSLLSVQERLNSLRSSFQTIRQHSEPSSENVTSSKWKDNEKDPALVGSLEPVAQHDDEEHELEELTKHINQPNINSDFENDVQLICELGFSEEAARHALKSFGDRGLAMSYLLENQC

SEQ ID NO: 4792 - protein, 822 aa, Naegleria lovaniensis
MSAEEQEPTTPSSKRALERKKQHEELLAKVKSQKEKNRLVVDEASQDDNSIVGVHPDTMEALELFRGDTVRIVGKKHKDTIAIVLSDEDCEKGKIKMNKVMRKNLRVRLGDVIILKQCPDVKYGKRIHVLPIDDTVEGLTGDLFDIFLKPYFLEAYRPVRKGDLFNVRGGMRSVEFKVVETDPDEYCIVAPDTVIHCEGDPIKREDEEARLNEVGYDDIGGVRKQLAQIREMVELPLRHPQLFKSIGIKPPRGILLYGPPGSGKTLIARAVANETGAFFFLINGPEIMSKLAGESEANLRKAFEEAEKNAPAIIFIDEIDSIAPKREKANGEVERRIVSQLLTLMDGLNSRSNVIVMAATNRPNSIDEALRRFGRFDREIDIGVPDEIGRLEVLRIHTKNMKLDDDVDLEAVAKETHGYVGADLAQLCTEAAMNCIREKMDLIDLEEDTIDAAVLDSMGVTMDHFRAALTTQSPSSLRETVVEVPNVTWADIGGLEKVKQELQELVQYPIEYPDMFAKFGQEASKGVLFYGPPGCGKTLLAKAIANECQANFISVKGPELLTMWFGESEANVRNIFNKARAAAPCVLFFDELDSIAKARGGSLGDAGGASDRVINQILTEMDGMGKKKNVFIIGATNRPDIIDPAVMRPGRLDQLIYIPLPDEGSRLSILKASTRKSPLAPDVNMQAIALATKGFSGADLTEICQRAAKLAIRESIQREVEYRRQKEEERKSKQMEEEDEDEELEENMDFVPYITRAHFEEAMRFARKSVPEHEIRKYEMFSTSLQQAAGDVRNFKFSDYDTSGTTSTTTTTEEVMDTDLYQ

SEQ ID NO: 4793 - protein, 199 aa, Naegleria lovaniensis
MKKSSNVRLQHSTGQRHEKTYGKFFNAPRIKNVTNTARRRSTEENGNDSSDQSESDEESTVHSTRNVSIIKKEEEGSMVDLTEEEPPKIIETISLESDNDEEENVTATPTTHNSVTNTEYTFSETVQDVNRKTVEELITFIKINDEELHNNIRNVLREQKISGSKFMSLSSTDFYQMKLHLKDQVKILQITNKIHQNSR

SEQ ID NO: 4794 - protein, 475 aa, Naegleria lovaniensis
MDQAVEQLVHRFNQVHSDKQEQEKFAKQMNDFLKLFNRFVASQKNQAQINWDRIRAPTEDHLKDYEQLTSDLNHSAIKNILNKLVVVKLNGGLGTTMGCTGPKSVIGVRGDDTFLDLTIKQIQYLNNKYDVDVPLVLMNSFNTSEDTAKIINDPKYANINVTIECFEQNQFPRIIKEKLLPFPDDIPNEKNKEAWYPPGHGDFYSSFFESPLYSKYKNAGKEYVFLSNIDNLGATVDLKILNYLINNKTDFCMEVTKKTLADVKGGTLINYEGEGVKLLELAQVPKEHVKDFESIEKFKIFNTNNLWIRLSSIETQLEELKQRVEIINNEKEVDGVKVIQLETAAGAAIQVFKKSIGVDVPRSRFLPVKKCSDLLLVQSNLYNLGDDYCLVKSTTEEAPIINLDDKFYKKVGDYLARFKNGVPNIVDLKELNVTGDVTFGKNVVLKGKVHVVAKQKTLVPDGSVISDETYRYSKL

SEQ ID NO: 4795 - protein, 439 aa, Naegleria lovaniensis
MRKFVVSSNIHSSASLFLKSVSQQQFCFYSRVKKEQETPTNVEKEEGSVPTVPISKPNSIEQQVKQILAFNNDGQVAEAVEAYGKLKKMTKHIDLKTMNAIVSSFAPKRLLFKWFKPYKDYVDMYVEASKFRPKERLEEAKRVFSDIYKYHNSPDAISYNALMKVQLSTDDVLHVFDTFNELQASGIGQSPMYKEQLLTSMGTLLRACSMLEQVQLAEEIYFFALQDIIKERLGYSHEKPWTASESVSYLTFCNTMLDVYAESRDPFAFKFFEQMVANSSSAHFSNQKIDQKTRFKRSPKLLGSLNGITFNTYAKACIFMDHRMKLVEMAERMRVEGVLQSELSKPVRLEIKHALETYTQPLHKVHRAELLSEGPHDMIATDHFADLRDFLIIDVDDENAAAWGRDVDTKDFKFMKFLKPTHDMYKIDLGDSFKGLLNQ

SEQ ID NO: 4796 - protein, 390 aa, Naegleria lovaniensis
MKARRVLSSLNLGTTATLRSVSTLNNKSSSIGFWRLASCSTLLHHENKNFIQARKFNQQPPISSSSQTNSINTTTTTTTSWPQKFVESAPSSIRPYLYLMRLDKPIGTWLLLYPCLWSLAFADVASLIPSIYYSALFAIGAIIMRGAGCTVNDMWDRDFDKQVERTKTRPIASGQISMKNATIFLGAQLLAGLAVLVQFNYYTIAVGASSLFFVFTYPLMKRFTYWPQSYLGLTFNWGIFVGYAAFAGFCNWSILVPMYLGSIAWTLVYDTIYAHQDKKDDRDIGVKSTALLFGDRTREILTGFSLLFGVCASLAGHNAGYDMIEQWPYFLAIFSSVLGSIYKIHTIDYNNSQQCMKTFVQNKWVGFVILLGIIGANWTKRRREKQPTQQ

SEQ ID NO: 4797 - protein, 474 aa, Naegleria lovaniensis
MYDFSSNPLLTNIQKPQQQGKEPTTASKISSHHQPKQQLATSDSSSARPPSRQKRPSSSRAENITSLNGGKSTTSTAGSSMEDRRVAFQATSPSELQPEKPNQKNPPLRTNTEYNNPDALIHNFQQTKPISKPFGQNYLNDKSQEESNIDIAEFRPKFQGSASAHKKEKPTTTTSKLQQGSHEHTIGLILNEYERGMVLYDKGQYEASLERFNECLNIFMKSKIEDAEMCANIFLAMGISYYGQGDEESALELYHRCIQRLEDKFGKNFPGIVSPLVNIALVYTNQKRFDEALGMFQKAQKLAENILGDDRLCLSDIYHNMGVIFDHQSRLEDAIDYYDKSIRIREKILGEDHPITALTYENMSQVLKDLRKFKKAVEYQNKVIAIRKKHLGVNTYDYALALHNMGLILFKDRNLPQALNYFQKAYKLREQLLGEDHEVTKASRQLYEEIDKRLSEKKKRVTSLSHSIVSNTNK

SEQ ID NO: 4798 - protein, 503 aa, Naegleria lovaniensis
MQDLKPIIPTARKSVGILGTSSSGELAKEHMVNRALMATSPVSNSSTGSIPLGTSATTTNTDKPQQPHASSLTPSPTTNMDTTQNSSKLSLENSEAIVYDSSEEEEEKVDILEESDSDHVDQLASSEEETAIRRRRTRSSTRADSNLSSSNTTKKNNDKDANQRQNQLASLRFTEKFKQGSEDEEGHPAVVFDSDDDEEEDTHRKFAENVSKAIPKQKAEPSRKKQKMTSITQLETTTNETATSKIEAKQSNVLSIEPHSVLFKFICSTTTNVELRNKLKQDFEDEKYVILRKKYNLKTPSRKGRISDNEVKLIKKYVEITSSLRLVRHPLSLTLFNNTKSFDEDRIKTWSNDSQEEEVNTTNVKHFIATITGRSFDLISSVWRKEEKNIHHRFVLYLEQMRYHFEVFVQPNTVHMDREQEEELKEMYISLLGLMKQYQDIVNTRREERKNGMLRETSIELSKFAKILSNLDEHFSRLDAYQRAYNEELHDALWSCAVKYLLA

SEQ ID NO: 4799 - protein, 314 aa, Naegleria lovaniensis
MLSSSDHHNSSSTTTNQPTKKKQKITLHLTGFGPFSGVKENPTTLIIEKLKNENFTLQSHDNYEINPIHYSIIETSMKAVKQYFEEMKCHAVQNQQDDESIDIFIHLGVSGNSIMYELEERAKNEKTFRAKDEQGEQPLNEPINEHLPQDTFLHCNFSTKLSSIIESVNRKLQLNSQLHPPLSQFVLETANHKLEKTQIVKSTKNALSSNQLEALKQLEELHNDLQESLSLITQSGAYCKASKDAGLFICNYCYYNSLQYSCSQNVVDIGEGMKRTCYSLFVHVPPHDLIPVHDQAQFVKTLLHTIVEHVVVSE

SEQ ID NO: 4800 - protein, 1405 aa, Naegleria lovaniensis
MTSEQQPNSFVADESGFSMISSSSDQGESTNPITTTATPTSNTSPPMSVLDNSSSPALERSLDGVSSLPAENISSSAMSTSTVVNSSSSIHVHSLSNSSTASNTTTVSSGVPSIQPKIIPGPPIYDPNRIPVMEGGIGNVLNSLGGSSSSGSTGSNVISSILGAGKETISSVLPFQIPLMDSSFTIGSSEKFSLNNVYQENAEKFKRFKNRTSWGYNNLLAYCCQTYVMIFDPVSMQQISSLFGHRYLTTCVEWCDMCKSRGIERGNTNMIASGDEGGFIVIWDYKKARKISSFAEDNGNTKKSIVQLKWLNGDNIYLMSLSAHNVFSLWNVQTATRIWDVEFPETITSFSIDPFTLKTCCLPSESGWTYFLNDLNVKKKPAEIQRRLYGSMDKKTGATQTTLKDFLCSPHTRNQFYVVAKKEVTVFDSSIRTTIHGKHLKGGRSDFQTLYTFEDEPKVMYSLHDDGTMCIWEYNGEKYDSTVCDVVRGSKHGADRPGLLYGVSISPLDHTKVAAVSADGKIWLWRVNLSNKMLSGGESSPEASSTKIKVNSKWMLDGLTEFTGSTVSSIKVSPFDDRVAVGTSNGLIMIYDLLTGSLKVKHDVFNNAPVLGIRWYGPNSLLCFSSSVFEKKKDRKNNELRLVNILSGKHTTIDINREDQNKREESSRAGGIKGIRVSNSYKYLVIILQDRPIEVWRLDTLKLIRMIPFTNVTALEWIPLSKNHPEREMLYFTTSDGSLHFYKVENYKVEPDVKKQKVFFTPVSALAWKNDILVSGDNVGTVTIWDLAKKKSRVLHTHKGLIKKIAFSKEHNHILVLFADGDFGIWDVDQNVKLASSPAYVKAVAADWGRGNYPVISTNSGSILVFDIQLTTCNTNLMFHSRSDFIKTPCCLKNDEAQYFRALIENNKLSFDDMMNENEIVDSPNTFRNCVGEVITDTKASVSLHDKMQSYRYLIPDYILHKLKNPATTTAERCLLAAQYFGDRIAEQFWRLAIEFLTKFSKQEITPTHQEAQKETATQQEEEHFFTEKTELERFDANVCLNSSLPTTFDLLRDNESVRNEEMKILQQHDQTLQHKLKSGAPTEQVNDLFSFIARNESELLQKDQAVKLLLQTPLDSKNLYANFLHATVLAASNSPSHFRETVQFVASSLISLKKENDIEFGVQLLCSIGEGLKACRILQDFDMWEKAARIAKSILPDHDCLIVLSRWADHLQSNNQLLKSIGVWMSLGLFKEVLDLLHKSELDDIASLFTKAYDEYLPHLPLSELHRYFILKVSSPSKLSEPLYSSSKNHDDFVMTCRKLKYFVYQQYAVFLDKIGYNELAEEYRCIIKPEEVGLSGIPANITQLLQGGEENNNAATESSLGQPLDRQESWVVVEEQANMTPNVQPSPSENKSTDIFDLPHEDQ

SEQ ID NO: 4801 - protein, 181 aa, Naegleria lovaniensis
MINRKDSDMLHSLEKRLAKIEQQTHYIIFTLQQLNNILDEYIQNHEESTQHPHHITLNTHHPPIETVNNSNVEKPEKKPPEINTERPTPLTPEKTSMRIQPKKPRTTVKAKPRRKTNQKMNKVHHHVVHDDDEIGQALTIHLTKHQLDKKHVVVRGLRKKHLTLYWIQDCSPPCCTTTIMT

SEQ ID NO: 4802 - protein, 414 aa, Naegleria lovaniensis
MFSNVHENSVIVSSSNTHVILPEIEKGPTKHFQHESDIFLYFNEDHHHGHNFISNKFQVYSAQANGPLLKEVNFTPHPLIMCCSEAYSQHYPLILSPDDIWLLIAQGFAKHVEIHSKQLRSQFISDNSECELKETMKHSLGTATSSQELGKIPITVYLEPYIQNKNDHSSCNVFKQVDWKGVVNEIVSKVNAHLIGDTLQWLQCNFTTSTYIEKTCSEIVMMSALKNYFSYRNMFKCGLPSVTLLGTLQDWESIKERTLQLEQYGMQFWIKALIPILDQFIETYKFNSTNDNPLPNSLKKFWNSIALSKVKSGSTKVTGWISYFFPYNSQNEISADLQNLSEHFLDQVDIHAWGTNASEFPSGLSSVDVAVENSPIANVHSLKYMAGFLGYDYDETWKGLKPRMGWVIASEKKK

SEQ ID NO: 4803 - protein, 509 aa, Naegleria lovaniensis
MSLKSQPPLQPQRTVLFMGSARVGKSSLCGYILLDHKPNTISRHCKRIKELFNEDREEAVFGCYGKKSLHCREEQSLRIAIHSYYSPEIRMINDNCTPTTANHINMNEWEVNEGLTFLYVSSKKKKINCFVSACFLADIGVLVVDVSNTGSSFEQDFNSEESTMKHQLQIAQACGMENIIVCLNKCDCEEKSTTDQCNRVSTCDISSLCESYHQVTATIQHYLKQMNWKQSNIFFIPTSGTKGYNVTARHEPYSFYEGPSLLEAIKEMAVKREVESILEKQPFRFSVYNCHRIGGVGPVVTGKVESGMVKKADVLLTHVSSHEVKSIEIAYHQVEHASAGDFCSLCLRNTCHSVMKFWRFLCNSRTELEDFDSFEAIIRVLYTPNQQVRAGFGCDLHFAINHCSCKLDDIISLLDDDMNDHLLSNSNKKIISKFPEGIRAAQIAQVRIRTFRSNFNKLIALPLKTFSDCPQLSRILLVDQAKRLLAFGYVTHLNRKARKNLEQQEDVIY

SEQ ID NO: 4804 - protein, 360 aa, Naegleria lovaniensis
MSSSDQSNLQELIANARLEAQQLKEKITTQKKLINDVNMKDLDIAEVNPPKLKERRVFKGHSSKIAALAWSKDSKQILTAGQDRMLILWDAMTTYKLSAIPLTSRGIMCCDYSPSGNYVCVGGLDNTCSIFSLAVVAQQLQNSSNEYKPYRQLVGHTGYLSDCLFTSDRHMLTSSGDQSCIFWDIEMTHAVTHFQEHTGDCMSISVSPTSDSNVFVSGSCDGTAKLWDIRMNKCVATFTGHEGDINSVQFFPNGHAFATGSDDCTCRLFDIRAGREVMTYSDDNVREGVTCISFSKSGRILFASYEDKKVIAWDTLKGTILQSLDGLPNGHDNRVSCLAVSPDGHGLATGSWDTTMKIFA

SEQ ID NO: 4805 - protein, 502 aa, Naegleria lovaniensis
MQTSSSSHFIDGSSCAAKKQLYDVIIIGAGMSGVNVGKLLKQRGLTNNVLILEANDYIGGRLCSKTLLNGKATIDIGGQWIGPPQPKVLNLVKELGLSTYPQYFEQEKRKSSLVFPSIGGKKHILKYTGSIPSDPKNVTDEVLMDFDHCIQNIERMAHTVPVDAPHECEKAEEYDSQTVQTFMDNMFKTEIAKDFFKTFVVTVFACQPYEMSTLFMLWYIAVAGGKFENLMNVRDAAQDCKIYRGSQGIVTGVAEQFKLNVLLKHPVVKIKDEGSSMSVTCKNGAVFQAKYVVTTNLPWTHLGIEYDPPLPSARHNFCQRTPMGYAIKCFMLFKEPFWRKKYDSNGFILSLQPEDYITLTYDIGYKDDMICGICGFVYAEKACEYSTFSREKKIDLLLKQYSETLGGTIEEWKSQFVDYIDKDWGLDPYARGSYGAVTVPGTLTKTKLAFREPLYNRKLFIAGTESASRWIGYMEGAIDAAERVVTELAPLFEPSQGRTSKL

SEQ ID NO: 4806 - protein, 750 aa, Naegleria lovaniensis
MSFAKSSLTSKEFSFMNTTAPSKDRKLPFLPGFTFDDKFVKERHHKSQLLAYKNHIPVVHDYDVPVEVDELQTETEKLADMLRSTTQLYKSTTINETKQKENWLSLEKKVLRFYAYFKEGVHESPVEQSRVRKCVIFYYLEDDTMHISEPKQDNSGIPQGTLVKRHRIPRDRMQGSSNVYYTIDDLNIGREITVYGKTFRIVDCDAFTREFFNGIGVEVPEPESYPGDQYTEKRENIQKSMNPYKTLSPMDQDLKKYMEYSFKGKRTNPSKQEKVAVQKFLAFDRQVLRFFCAWDDTEKLYGDKRFFVLEYYLSDDTMKISEVFSANSGYDPFPVFLKRQKVPRIKNSANEPTTYYDETDLGIGKRVVVFSKNFLLYDCDPFTREFYAKKYGITDMTPIEVKDSPKTEIQYEEPPYNGFGDEEDSLGSWKYLVIKPPKKDVKKYIENDHKLFRYSAVMVTDKPEDKGRKFILSYYLSDDTISVFEPVQRNSGVIGGKFLQRSRVKNERGEYYKANETFIGATLNINNYMFYLEETDEYTVNYMEQHAEQFPKANIEMILNRIRKHVQDSSLEYKLRDAMGSAQRGSRIEMDELRQLLQSMGLDLVEHELITVLRHFKANQDGTIDLSEFITAITSGPVSTKKEHTVQPQKQKDTVSFNNAYKVFNEKISTRRLLVQDTFKVMSDKSVDGLIGESEFKKAVQDHLKLNLTNDQVSSLVDHFFPETKKRLTLIEFMKIIEGTSTYLYLKNNK

SEQ ID NO: 4807 - protein, 503 aa, Naegleria lovaniensis
MWLEQVGKTKQQLNNKKNNSIHKPSIQSINCSHDENNSTQNSSHTCSESTLCLLCKKPVDDSLETISVGMRGVHDLQKFLPYHPNKQYLLEQEERLSYSEFLHSLSQKKLYVHLDCYSPYTVRPYQIMFETSLLNDQNPDEEWMGEFSNVLYKRISRMQQLYRKVNGKKRSKQKEEDEHAEEEEDEDDENSSHKKVKVDSLQKTYVKKKSPRKSGSKDSQASQSASSSSLDTSQSLQWVQSLRDSMESFSSPYLFGLSDEIWNEILSYLTFPKLLSLNKVSKCFYYYSTQSTLWKEQCIQALCPNAIQVQEQYFPHWSNDFKKVFQLLYGNCCIICGEYMRLDEQLYQSTSLSASMGSILVSKYPLYYNHLLDGCVCTACSGSSLAENITKTNAKKKYSVNDEDLNLIRCLRSPNPWHPSTAMCVYSDLQLQVLQSRKNEEAIIENCHKSKNHSKQNLFQLIRNARNGKYGKNCKLYAYLTSNKANAKTAFRDIFAYIDTLEI

SEQ ID NO: 4808 - protein, 365 aa, Naegleria lovaniensis
MSKPSGVRQQERRDHDMENFGDEQVQPSSPLMEHQTKKLKNLDSMESTDFMMLQEKISQHNEGNGFVFETEEQKTIFEKLITVESDPFIITNAPLYEKITTGLREQYKMMQHEDGGCSWWSLQSAVTEINEMLSQGEKDADAILSALKGLKPARIPTPYDLFLQSQKSLPPNASVFTTMRMVNHLLTYQFRFKKNVRFGIQLVERSQVLFPDAFAQLDNAIGDSTLVFFKCEGLKAETLKHKDNFRMYVEMKGMLREWMDALVIHEKHTIENAQMIKVYGLLVSKFQCKFLEGSIKIHDDHNISGEKPFRYAIKESNYIDLETIDGVAEFTTFIEIICEHVFKCKLQIANDIHGEKGILSSKPIL

SEQ ID NO: 4809 - protein, 356 aa, Naegleria lovaniensis
MSSSTGIQEAISNARREAQDLHEQIKNQRKKTNDANLRDMDVPDMLPMKIRERRVLRGHYAKIYSLAWGRDSTSLVSASQDGKLIIWDAVKAYKTHAIPLRSHWVMCCDYSPSGNAVACGGLDNICSVFLLSTVQQNPNATDMKPHRELTGHTGYLSCCKFLNDRHILTSSGDQSCILWDIEMNQPVTRFEEHTGDCMSVSIKPDGDNNLFLSGSCDGNAKLWDIRMNKCVATFTGHEGDINSVQFFPNGNAFATGSDDCSCRLFDIRAAREVMTYSDDNVREGVTCISFTKSGRVLFSAYEDKKVIAWDTLKGKVLQTLEGLPNGHENRVSCLAVSPDGHGLATCSWDMTVKIFA

SEQ ID NO: 4810 - protein, 470 aa, Naegleria lovaniensis
MESLQGANMNSSVASSAACITSSTSSPSILMTINNNNNHSSSQHISRCHSSHQYSTTTTTSATTTTSSHQNHSSSRSFKQFFSKLANMVKPNPAKKKKKKKKENSTTSSSSGCSSPSSSSFETLKHVSSPTHGVAISNLPSMNDECFMSMASSSYHHHPPSQQQISNFPSHPTHHQPSQQPFMFSSVIAKTRDSRTRAKNTSSTSLPDNCCTTTTTTLGGISCSNHSPLTNMTTATALSTSPRMIGHTHTKNHSSSTILFNEEQVSSDLDLDWDDVVEDLEKFSSFTMTMDDKENVVLDHRHQQTELNEEERQPHSSVQQNKHSKRRHTTHFSSKSYHHSAFSSQPSLANKLPNNCSRSKRESSKSENRIKDQDDLDTMVDLMWITDGPTTTSTTMETVNRKKNPSLLSVVDSCDISVDTNKNGNNSASFVHIKSTSASNLYSSLSTQDFEDFSFSPGCNFQTSSSIIAL

SEQ ID NO: 4811 - protein, 775 aa, Naegleria lovaniensis
MKKTHHYGLDDAGMIPEAFELPSKQEVIVLEGNGAVHEVLPQHLLNEEDAKSNVSASSTVSDQEEFEYKPVTNLVEYFSDENNRKQIDVVLHCLAKLEEESSDKTKAVEHNGKFQFLCNILYELDKYELEFYMLQLLNTYMMKAGDGDSHLERYILEICAHSMHFGIKLSWLLDAELYTLENQLAQSPNNIKLKKRAQRGMIFRNLVEKVTINQVVPINYMNDNFLNTSILQVDAEVTSEEPTDEEKSKMTSFVLQNVFSKQRRSNYFNDEHYFVHTLTDLSYRLKAYPPGDIRKHRMKAELERINQTIPYGVYYPLCDSKTKHCRILRVCTDACRVFSTKERVPILCVFEVVQSEHTCNQPENILQFEENPDGEYKIWDCMINKTLDPGQLIRVSSEHSNEPKSTLKKENSSSSIKAPLHEEKRTSIVSNAEPTSHNSPMLEKPIHSKSTSELPILHIPNLNNDEFVLIEKSDADKHIEEVAQEMDSVFGESFEKIKAKYRTLSPYGSVPGWDLKSVIVKANDDIRQEIFAMQLIKLFAQIFEEEKLPIYIRPYEIIVTSGNCGMLETVRDTVSIDGLKKKFPNFTTLKDYFIRVYGSPTSNTFIRAQTNFVESVVGYSLITYILQIKDRHNGNILLDREGHMIHIDFGFFLGISPGGVKFENSPFKLPQDWVDLMGELFDLHFRPVFYVAYSALRKPRNMNRLLNLVEMMIGANYKCFDNNHANIMRDLRNRFYPNLSDDDFAKTARKLVDDSMDNWFTKKYDQYQYLTNGIL

SEQ ID NO: 4812 - protein, 416 aa, Naegleria lovaniensis
MSSFDLDQYISGYSGLTKVKRLQFIVENSKELRSKALVKLIDLLKTGKNTTLYKEVIEKYGKEVGQTLDTEWIAQVDRAATKQQEKLEVELNAHKTNLIKESIRVGHNDLGDFHLERGNLQESLKSYLRTRDYCTSSKHVNEMCLNVIRVSIEMGNYALVNQYVTKAENTPDVSDGTDIITTTKILASSALANLEGKKYKIVARKLLDCDIQLENSFNDVITCSDISVYAGLTALATFDRRELKEKVLSNNKYRGFLELEPDISNIINCFYESKYTACLESLDKLLPRLLLDIYLRDHVSTLYEKIRSKALVQYVSTFTSVDMNKMAVVFNTTVDNLEKEIAALIMDKQIKARIDSHKKILYARVTDIRNATYQKTLEMGEQFVRESEAAILRMNVNKQRDFVIKPNRKAAKQMMF

SEQ ID NO: 4813 - protein, 225 aa, Naegleria lovaniensis
MLDGVILTDDYFKILFSRKSPTILSALSTSFQQKQQSEDEGSLLGSFSKPTSFSPKKRSSLSTTLMMAKRSGTIASSSSNLEGSPSLSSSLLNNDYKNQNVAWADTIVDYVRRVNKGSIPQPDGFFKVFSFMNERMIVFTRIQSVLFFVVGDEDLGELALREVCKNVMEGCKTVCRKTPEDPDTVLKNYGKICTLIDDILQEDGLGMGCFNGEMAEVKRIEDLTD

SEQ ID NO: 4814 - protein, 383 aa, Naegleria lovaniensis
MKKSTLILLGVVASLLLLFVCSQMVVADHINSDSSKDDGKSKVEISKKDNENNDKKSTLPIDDKDEKKEDDKKSNDNKEDNDYKKDHSKKFFDKKHCKHVCVKFKSENGKCLKHKIVGQTKVCDKYATVKAKCFKYKTLSKCDKYSKAEKKCIKYAHKKACVKHQKKRVCDAYGSKKICSSFKTKKICDKYVTKKKCEKHKVKKVCKKHEKVAINKCEQVVASHKKKNHGSDNSKEKDFSDSYLPQPIKKCRVVGYENKCVKHEKVKFCAKHKKVQKCSKFLKRKYCAKYEKKQFCKKYKTLSKCVKHSKKKYCVKHKTVKAKCIRFKKEKKCVKKSKAKRVCKKFKWTKGEKICVKHEKKKVCAEKKKICEVDKKKPDSYVL

SEQ ID NO: 4815 - DNA, 25860 bp, Naegleria lovaniensis
  source 1..25860: mol_type = other DNA
cctgtgaagttttggatccaatcggaaatcccaaatttaaatcctgagagaatttagtacctatcgagaaggtactagtttctgtattggaatgatagtgtgctttggaatggagaggagaagaccattcatgccacgatttcaaatcttgaaatttttcgtacatgttgcacatgacttgattcactcctccgagttgatcatgatcgcattgaacggtcaaggtgcatccaataatttctgtttggatggactttttggtgtcttgttgttgaccaataactttcaaggcttgagccaaatgtttgttattggactcgaacgagagaggtgtgattttagaaattgctcggatcatgttgttagtggtcgttttgttgatgttgtttgtttgatgatttttcattaaaaattcacatcatgaacgttttaacagcgagagagaatgcgtgcgttccaagtgtcgttcaatttttttgttgtgtgaaaaggtgcgcctttgagaaatgtgagcgcctgaaagtgaggtgttgttaacgagatcagaatgatttgaaaagagcttacgtaaatacaatgattcacaagagttgtactgttgtctcgcgagttgtttttgaggtgttacaaatcgtgaattcacttttttccaagcaacttctaattggatttccattttgaaacaacaaaaaaaaaatcaaaactcttcgaattcacaaacttctacttccgaattcactcgaaatgtatccttcagtggtggaccttcccacgtgtgacacgaccacagatccacatgctttgaattcaaatggcaaccagtcgactcaaccaatctcacaccaacatgtgttgtccaaccattcatcgattcggaacaagagatttgaaacaaactcttccgatgtagtggccaccaagaatcctccttccacgaaccctcttcactcctcctttcaaaattctttaacattccatgatgtgtcacagaattcaacattgtttcatgatacttttgatccattgttgttaatgagcttggttgaaactcttcaaatgcactctgaagaaacccatcgatggaaacaatcgatttcagaacacattcaacacatggacatgaaaatgagtgccattttgaattttataaagaaaaatcaagtgcattcttctctcaaagaatctcaaatcaataatcaatactcaataatgatgtcacaagatcatgatccaaatatattacatgtgaactctcctgaggtattattgaatactacactcaaaagtccagtacagaatgatgacaagggttatcatcatcctcatgccatacgagaccttaacgaatcgagaaggcaattgacacaatattcacaaccctctgcgacactcaatccttattcgtacaatcaagcacttgatggtactttctgcacttccgtacaggattctaattccttagatcaaaagaattataatggaccattcgtgacgacatgccaagcaacaacgaccgtcactgcttgtattgtaccacctcctcagtctcctcctcaagtaatccctactagtcttctttcggtacaggaacgattaaattctttgagaagctctttccaaacaattcgtcaacattctgaaccttcttccgaaaatgtaacatcttccaagtggaaggacaatgaaaaagatccagctttggttgggtcattggaaccagttgcgcaacacgacgatgaagaacatgagcttgaagagctcacaaaacatatcaatcagccaaatattaattcagattttgaaaatgatgttcaactcatttgtgagcttggcttttctgaggaagctgcaagacatgccttaaagagttttggagatcgaggattagccatgagttacttgttagaaaatcaatgttgaaactttgtgtaaatgatgagatacaaattcaattaaatttaacaaaatttctttcaaccttgtttcatgaatccaggctactgattttctctctgataattatcgttgttcacaacaaacgttctaaaattcttcttgttttcttgacatctctgaaattgtttgagaattcaaaacacttgttggagatccaacgagctgtcatgattcacagatgcttcaggttggtcacagaattaattcaagcaattgattgaggcaactggacgtccttatccactatccctttaccaagcgaagaactccatgcaaacaagcacaagtctctcagcgttctaaaattatttctttcattccgatacaccacagcaagttcacagtaaaaatgcgataagaggtgacgatgatcaaaaaaccatcttaaaaaaaaatcaaatccaaagagaagatctcttttccaacacaaccatcacacacgatcgtataaaatgtctgccgaagaacaagaaccaacaacaccatcctccaagagagcactcgagagaaagaagcaacacgaagaattgttagccaaggtgaaatctcaaaaggaaaagaaccgattggtcgttgatgaagcctctcaagatgataacagcattgtcggtgttcacccagataccatggaagccctcgaattatttagaggtgatactgttcgtattgttggtaagaaacacaaggataccattgctattgtattatccgatgaagattgtgagaagggtaaaatcaagatgaacaaggtgatgagaaagaatttacgtgttagacttggtgatgttattatcctcaaacaatgtcccgatgtaaagtatggtaagagaattcatgttctcccaattgatgatactgttgaaggcttaactggtgatctctttgacatcttcttgaagccatacttccttgaagcatacagaccagtcagaaagggagacttgttcaatgtacgtggaggtatgagatcggtcgaattcaaggtcgttgagactgatccagatgaatattgtattgttgctcccgatactgtcattcactgcgaaggtgatccaatcaagagagaagacgaagaagcaagattgaatgaagttggttatgatgatattggtggtgttagaaagcaattggctcaaatcagagaaatggttgaattgccattgagacatccacaactcttcaaatctattggtatcaaacctcctcgtggtattcttttgtatggtcctccaggttctggtaagaccctcattgcaagagcagttgccaatgaaactggtgcattcttcttcttgattaacggtccagaaattatgtccaagttggctggtgagtccgaagcaaacttgagaaaggctttcgaagaagctgaaaagaatgctcctgctatcatctttattgatgaaattgactctattgctccaaagagagaaaaagctaatggtgaagttgaaagaagaattgtttctcaattacttactctcatggatggtttgaattcaagatcgaatgtcattgtcatggcagcaacaaatagaccaaactcaattgatgaagctcttcgtagatttggtcgtttcgacagagaaattgatattggtgttcctgatgaaattggacgattggaagttttaagaattcacacaaagaatatgaaattggatgacgatgttgatttggaagctgttgccaaggaaactcacggttatgtcggtgccgatcttgctcaattgtgtactgaagctgccatgaactgtatcagagaaaagatggacttgattgacttggaggaagacaccattgacgctgcagttttggactctatgggtgtcacaatggaccacttcagagctgcactcacgactcaatcaccatcatcgctcagagaaactgttgttgaagttccaaacgtcacatgggcagatattggtggtttggagaaagtcaaacaagaattgcaagaattggttcaatatccaattgaatatccagacatgtttgccaagttcggccaagaagcttcaaagggtgtccttttctatggtcctcctggatgcggtaagacacttctcgctaaggccattgcaaacgaatgtcaagcaaacttcatttctgttaagggtccagaattgttgaccatgtggttcggtgaatctgaagccaacgttagaaacattttcaacaaggctagagctgctgctccttgtgtcttgttctttgacgaattggactctattgctaaggcaagaggtggaagcctcggtgatgccggtggtgcttctgacagagttattaaccaaattcttacagaaatggacggtatgggaaagaagaagaacgtattcattattggtgctaccaacagaccagatattatcgatcctgcagtcatgagaccaggtcgtttggatcaattgatttacattccattgccagacgaaggttcaagactttcaattttgaaggcatctacccgaaagtcaccacttgctcctgatgtcaacatgcaagcaattgctttggcaactaagggattctctggtgctgacttgactgaaatttgtcaacgtgctgccaagttggctattcgtgagtcaatccaaagagaagtggaatatagaagacaaaaggaggaagaaagaaaatccaagcaaatggaagaggaagatgaagacgaagaattggaagaaaatatggactttgtcccatacattacaagagctcacttcgaggaggccatgagatttgctcgtaaatcggttccagaacatgaaattagaaagtatgaaatgttctcaacatctttgcaacaagctgctggtgatgtcagaaacttcaagttctcggattatgacacttcaggcaccacctcgacaactaccacaaccgaagaagtcatggacactgatctctaccaataattcaattaattattattaaaaacaataatctttcatgtaaagtttaatttgattttgtgtaaagttgtaaattcagcgttttggagattgcctcccgagtttcctgtccatttgaatggaataatttcaaacacggcaaaagtcaatgattgtgcattatataatcatctttgttttaacgggaattttggtggattttgtttgtaatttgcaggatcttgacttgatctttgaggtgtaatttcatttgataaaaatcagttgaactcaagctcatgaatttgcttccagaaattttctgctctcttaatacatttctgatattgttgtgcaattcttcatcattaattttgataaatgttatcaattcttctacggtctttctattcacatcttgaactgtttcagagaatgtgtattcagtgtttgtcacagagttgtgagtggttggtgttgcagtgacattttcttcctcatcattgtcgctctctaaagaaattgtctcaataattttgggtggttcctcttcagtcaagtccaccatggaaccttcttcctcttttttgataattgaaacattacgagttgaatggacagtgctctcctcatcactttcggattggtccgacgaatcattaccattttcttctgttgatcttcttcgagcagtattggtcacctttgacaagtcaatattgtattcattcaactctgtcaggtaacccaaataatttctatacttgtaactggattgaaacaagagctttttcttgaaaaattgcacttcactttttttccttccaccactgccaccacctttcactatttttcgaggtcaagtcttcaaatccactcacattttttattcgaggtgcattaaagaattttccataagttttttcatgccgttggccagtcgaatgctgcaacctaacattggaagatttcttcatgaaaatttgaattttgaaattaataattctcttgagtttgcggaatccatgggtatggtttgcaccaagtagggattggatcattcagaggacgtcaaagccatgcttctgttttgattcgttcaacaaggaatcttgtagaacgaccatccaagacagagaattgacaaagaattttcaatttcaagtacctactaacattggcaaatggagagcaaaatccaagtgtgtccattcattcataccatacgcagtcagatgatggcattagattgttgagtctagtcaaacatattctcatcgcttgataagtagggctatgccagggaaaggacccaacgcacacaaggtgctcaaaaactaattctatgagttgtaaggaatagaagaagaatatttcttgctccagtgatctctgtcaatcattaaggttcggcgaacttttccgtatgaacaagtttatgatccgttttaagagaaaagatcattccccattgcaaacactggacaatattcaatccgtagtttgatgttccactcagtattcaccactctataacattgaaaagattccatgaggttcgaaaggtaaagggaacaattttgtatcgagttaaatgtgtgtcacccttcatgttgtttccatctgagcctcaaagtttagaatatcgatactgacagaaagtaaataggaatgaattaaaaaatagattgttgtaaatatattaatactgtacagtttcatcagaaatgacgcttccatctggcactagagtcttttgtttggccacaacatgaacctttcctttcagtacaacattctttccgaaagtaacatctccagtcacgttcaactctttcaaatccacaatatttggaactccattcttgaatcttgcgagataatctccaaccttcttgtaaaatttgtcgtcaagattaatgattggggcttcttcagtcgtgctcttgaccaaacaatagtcatcgccaagattgtacaagttggattgcaccaagagcagatcagagcatttcttcactggcaagaatctagatcttggtacatcgacaccaatggactttttgaatacttgaattgcagctccagcagctgtttctaattgaatgactttcactccatcaacttctttttcgttattgattatttcaactctttgtttaagctcttccaattgagtttcgatagaagaaaggcgaatccacaaattgttagtgttaaaaattttgaacttttcaattgattcaaaatctttgacatgctcttttggaacttgagcgagttcgagaagtttaacgccttctccttcataattgatgagggttcctcctttcacatcggccaatgttttctttgtcacttccatgcaaaagtcagtcttgttgttaatcaaataatttaaaatctttaaatctacagttgctcccaaattgtcaatattcgacaagaaaacatattcttttcctgcattcttatatttgctgtacagtggtgactcaaagaatgagctgtagaaatctccgtgtccaggaggataccaagcctccttgttcttctcatttggaatgtcatcagggaatggaagcaacttttccttgatgattcttggaaattggttttgttcaaagcactcaattgtgacattaatattggcatatttagggtcattaatgatttttgctgtgtcttcagaagtgttaaatgagttcatcaacacgagtggcacatctacatcatacttgttgttcaaatactgtcgatgtgatggcgataatgaaccgaattggcagatgaaaattgtcgttccgatattgaaaattcatttgcaattgaatttctcatacatgaccgttggtgaatcatcaaattacatacctgaatttgtttgatggttaaatccaagaaagtgtcatcgcctcgaacaccaatgacagactttggtccggtgcatcccatagtggttcccaagccaccattcagtttgactaccacaagcttgttgagaatattcttgattgcggaatgattcaaatcgctggtcaactgttcataatccttcaaatgatcttcagtaggtgctctaatacgatcccaattaatctgggcttgattcttttgtgaagcaacaaaacggttgaacaatttcagaaaatcattcatttgcttggcaaacttttcttgttcttgcttgtccgagtggacttgattaaatcgatgcacaagttgttctactgcttgatccattgtgtcgtgtaatatgaaatttcaaaagagagaaaacaagaggatgatcgtggaaaatcttcggaagcttttgcactaaaatacaacaaggcttaatgaaccaactctcggaaactagcgcttcagtggttgatgatttttttttgattttggaaaaggcctttaaataacagctcatacggtttgtatgaagacccaagttgatagggtcggggtcttttatggaaggggtcctgttgcatcagtggttgaatacaaaatggtttgggaaatgaaaacattacacaacttgtgaatttaggattcgttctttcgtcacgtaggtaacacgtagttgaaaatggcgaatatcgatttggaagttaaactaatttaatgacaactgttggaagttaatacctaggttaattcgagaatgttcgttcatttagataaattttcaataacaggtgcgtgatttgttggatggatttgttggctaagtgtgtacctaatgaatacactaagattgcctttcaatttagcaactttttcatgtggctcgaccttaacggtgttgcatttccttgtcggcagcgactgaaaaactgttgaaatttcatacacaaaaacgaaagcaactgtattactcatcattattattattattaaatttcgtttccttagttcacgatgtctttgctgctcacaaaacattatcattgcttcctggtgctgctgttgtgaggtatgcaacacacccatcactacacggtactggtggtgctgttcttgtttcttcttaacctgcattttaagttgagtgaactgttcttactccttgatccattgttaaaacttgaatgtgctcacctatagtgcgcagcacttgaggcatttcattcgctgcgacagcaaagaattgcagaagctgttttgaatttcgaaaaaaatgagaaaatttgttgtgtcatcgaatattcattcatcagcttctctctttctcaaatcagtttctcaacaacaattttgtttctattcacgagtgaagaaggagcaagaaacaccaacaaacgtagagaaagaagagggttccgttcctacagtgccaatttcaaaaccaaacagcattgaacaacaggtgaaacaaattttggcattcaacaatgacggacaagtcgccgaggctgttgaggcctatggaaaactcaagaagatgaccaagcacattgacttgaaaactatgaacgcaattgtgagttcattcgctccaaagaggcttctattcaagtggtttaagccatacaaggattatgtagatatgtatgtagaggctagcaagttcagaccaaaggaagtacgttattgttgttgtttgttctaatatttctaattatctaaatttctaatattattttctaataatttttcatcgtttgatgatgatggtctttcatggacgacgatgaattgcgaatccgatttgttcatcaatgttttttaaacaaacaacaattatttcagagattggaagaagcaaagagggtgttttccgatatttacaagtatcacaattcacctgatgccatctcctataatgctctgatgaaggtacaattgagcacggatgacgttttacatgtctttgatacattcaacgaattacaggcatcaggtattggccaatcacccatgtacaaggaacaattgttgaccagcatgggtacccttttgagagcatgttccatgcttgaacaagttcaattagctgaggaaatttacttcttcgctctgcaagacattatcaaagaaagacttggttactctcacgaaaagccttggactgcaagtgaaagcgtttcatacttgacattttgcaataccatgttggatgtttatgcagaatcacgtgatccatttgctttcaagtttttcgagcaaatggttgcaaattcatcgtcagctcacttttctaaccagaaaatagatcaaaaaacacgattcaagagatcacctaaattgttaggctctcttaatggcatcacatttaacacatacgcaaaggcctgtatatttatggaccatagaatgaaactggtagaaatggcagaaaggatgagagttgaaggtgttctccaatcagaattgtcgaaaccagtaagacttgaaatcaagcatgccttagaaacctacacacaaccattacacaaagtacatagagccgagcttttatctgagggcccacatgacatgattgccactgaccactttgctgacttgcgagacttccttattattgacgtggacgacgaaaacgctgctgcatggggtagagatgtcgatactaaggactttaagtttatgaaattcttgaaaccaactcatgacatgtacaagattgatttgggcgacagtttcaaaggtcttctcaaccaataaacgcgtttgcaatagattgaggttcatgaacagttaaaaaaacaaaagttaaaaaatgaaagctcgccgagttttgagctcgctgaatctcggaacaactgccaccttgagaagtgtttctactttgaacaacaaatcatcaagcattggattttggagattggcatcatgtagtacattgttgcatcatgaaaacaaaaatttcattcaggcccgaaaattcaatcaacaaccacccatttcatcatcaagccaaaccaattcaatcaatacaacaactaccactacgacatcatggccacagaaatttgtagagtctgcaccaagctccattcgaccctatctgtatctgatgaggcttgataaacctattggtacatggcttttgctttatccgtgtttatggagtttggcgtttgcagatgttgcctctctcattccgagtatatattatagcgctttatttgcaattggtgcaataattatgagaggtgctggatgtacagtgaatgatatgtgggatcgtgattttgacaagcaagtggaaagaactaaaacgaggccaattgcaagcggtcaaatatccatgaagaatgcaacgatattcttgggagcacaattgttagctggcttggcagtgttggttcaattcaattattacacaattgctgtgggagctagctcattgttttttgtgtttacctatcctctcatgaaacgatttacgtattggccacaaagttatttgggcttaactttcaattggggtatttttgtaggatatgctgcctttgcaggtttctgtaattggtcaattttagttcccatgtatttgggctctattgcatggactcttgtctatgacactatttatgcacatcaagataagaaggatgacagagacattggagtcaaatccaccgctttactttttggagatcgtacaagagaaattttgacaggattttctctgcttttcggcgtctgtgcatctcttgctggtcataatgctggatatgacatgattgagcaatggccatattttctcgcaatattttcttcagttctaggatccatttacaaaattcacaccatcgattacaacaattcccagcaatgcatgaaaacttttgttcaaaacaagtgggtcggatttgtaattttacttggaattattggtgctaattggaccaaacgaagaagggaaaagcagccaactcaacaataacaatttcaacaagcttttttgaacaatagaggaagttaggtaaactctttttatttattggtattactaacaatagagtgcgaaagagatgtgactcgttttttcttttcacttaaccgcttatcaatttcttcgtagagttgccttgatgcttttgtaacttcatgatcttctcctaacaactgttctcgtagtttatatgctttttggaaataatttagagcctgtggaagatttctatccttaaataatattaatcccatgttgtgtagagccaaagcatagtcatatgtattcacaccaagatgtttctttcggatggcaatcaccttattttgatattcgacagcttttttgaattttcttaaatctttcaaaacttgggacatattttcataggtaagtgccgtaattgggtgatcctctcctaaaattttctctcgtattcttatggatttatcgtaataatcaatagcgtcctctaatctagattgatggtcgaatattactcccatattgtgataaatatctgacaaacataagcgatcgtctcccaaaatatctgaattccaagtcagttctttgaattcacatgctactaatcatgttacttactttcagctaatttttgtgccttttgaaacatgcccaatgcttcatcaaatctcttttgattggtgtaaacgagtgcaatattaacaagtggagagacaataccaggaaaattttttccaaacttatcctccaacctttgaatacatctatgatacaattctaaggcagattcttcgtcaccttgtccatagtaagaaattcccattgctaaaaagatattggcacacatctctgcatcctcaattttagatttcataaatatattgagacattcattgaaacgttcaagagaggcttcatattgtcccttatcatacagtaccattcctcgttcgtattcatttaaaatcagtccaatggtgtgttcatgtgatccttgttgcagtttcgaagtagtggtggtcggtttttcctttttgtgtgcagaggcagatccttgaaatttaggcctaaattctgcaatatcaatattcgattcctcttgagatttatcatttaaatagttttgcccaaatggttttgagattggcttagtttgctgaaaattgtgtatcagggcatcagggttgttgtactccgtattggtccttaatggagggtttttttgatttggtttttctggttgtaattccgatggggatgttgcttgaaaggctaccctcctatcttccatgcttgatcctgctgtagatgttgttgatttacctccattcaatgatgtaatattttcagctctggatgatgaggggcgtttttgtcttgagggaggtcttgctgatgatgaatccgatgttgctaattgctgttttggttgatgatgcgatgaaatcttggatgcagtggttggctcttttccctgttgttgtggtttttgaatgttggtgagcaaagggtttgacgaaaagtcatacatttttttggcggggcagaagtaaattgttttttaaaaaaggaaacatagtccaaaagaacctcaatatttcgaaactttatcattctttttaatagaattttccttaggccaacaggtatttgacagcacatgaccaaagagcatcatgtaattcctcattgtatgctctctgataggcatctaatctagaaaagtgctcgtccagattggacaagatctttgcaaatttagacagttcgatggatgtttcacgaagcatgccgttttttcgttcttctcttcgtgtattgacaatatcttggtattgtttcatgagtcctagtaaactgatatacatttctttaagctcttcttcctgttcacgatccatgtgaactgtgttaggctgaacaaagacctcaaagtgatatctcatttgttccaaataaagtacaaatctgtgatgaatgttcttttcttcctttctccatacagagctaatcaaatcaaaacttcttcccgtaattgtcgcaataaaatgttttacgttggtagtatttacttcttcttcctgagagtcattactccaagttttaattcggtcttcgtcgaaagacttggtattgttgaagagagtcaatgagagaggatgtctgaccaaacgcaatgagctagtgatttcaacgtattttttgattaatttgacctcattgtcactaattctaccttttctgcttggtgtctttaaattgtattttttccttaatattacgtatttttcgtcttcaaaatcttgtttaagtttgtttcgcaactccacattagtagtggtagaacaaataaatttaaacagtactgaatgaggttcaatagaaagtacatttgattgcttcgcttctattttagatgtagcagtttcgttagtagtggtttccaattgcgtaatactcgtcatcttttgtttttttcttgatggttccgccttttgttttggtattgccttgctaacattttcagcaaattttcgatgtgtatcttcttcctcatcatcatcggaatcaaaaacaacagcaggatgaccctcctcatcttcactgccttgtttaaacttttcggtaaatctcaacgatgcaagttgattttgcctttggttagcatccttgtcattgttctttttggtcgtatttgatgaagaaaggtttgaatcagctctagtactacttctggttcttcttcttcgaatagccgtttcttcttccgatgatgctagttgatccacatgatcggaatcactttcttccaaaatatctaccttctcctcttcctcttcagatgaatcataaacaatggcctccgaattttccaatgataatttacttgaattttgtgttgtatccatgtttgttgttggtgagggtgtgagcgacgaggcgtgtggttgttgtggtttatctgtgtttgtggtggttgcactcgtgcccagtggaatagaacccgtactactattgcttacaggagaagtagccatcaaggcccgattcaccatatgttcctttgccaattctcctgaggaggatgtgccaaggattcccactgattttcgagcggtaggaatgatgggtttgagatcttgcatttttgtttttttaaaaatactaataatttttcaactttttggaataattattattatttaagaatttcattctgacaccacaacatgctccacaatggtatggagaagagttttcacaaattgtgcttgatcatgcactggaatcaaatcatgaggaggaacatgaacgaataaactgtaacatgttctcttcattccttctccaatgtcaacaacgttctgagaacacgaatattgcaacgagttgtaataacaataattgcaaataaatagacctgcatctttggaagctttgcaataagctcctgattgggtaatgagagaaagagattcttgcaagtcattgtgcaattcttcgagttgtttcaaagcttctaattgattggaagagagagcgtttttcgtggatttcacaatttgagttttttccaacttgtgattggcagtttcgagaacgaattgtgagagtggtggatggagttgggaattaagttgtaattttctattgactgattcaatgatggaagaaagtttggtgctgaaattgcaatggagaaaggtatcttgtggaaggtgttcattgatgggctcattcagtggttgttctccttgttcatcttttgcacggaaggtcttttcattctttgctctttctatgaatggttgaaagtttgagaatggtcaagtggtagtcgcatcgtatgtcatgtccgtgaccattgatgaaatgattattggaaataattattttaaataaatgtgaaatgattattttaaataatgcaaaataatagaattgaaatccataccttctagctcgtacatgatactatttccactgacacctaaatgaatgaaaatatcaatagattcatcatcttgctgattttggactgcatgacatttcatttcttcaaaatattgtttcactgctttcattgaagtttcaataatactgtaatgaatgggattgatttcataattatcatgagattggagtgtaaaattctcattctttaatttttcaatgatcaatgtggttggattctctttcacacctgaaaaaggtccgaatcctgttaaatgcaaagtaattttttgtttcttctttgttggttgattggtggtggttgatgaggaattgtggtgatccgatgatgacaacattttagattcgggtggaagcaagatcacaaaatatatttttgaatattttttttgtaaaaagcttaaaggtcaactccaactattgatcttcatgaggaagatcaaaaatatcagttgacttgttttcgcttggggaaggctgtacattgggtgtcatgtttgcttgttcttcaacaaccacccagctctcttgacgatcgagtggttgacccaaggaagactcggtcgctgcattattattttcctctcctccttgtaaaagttgtgtaatgtttgcaggaatgccagaaagcccaacttcttcaggtttgatgatacatcgatattcctctgccaattcattgtaaccaatcttatctaaaaatactgcgtattgttggtaaacgaaatatttgagctttctacatgtcattacaaaatcgtcatgattcttactactgctatacaaaggttcacttaatttcgatggagacgagaccttaagtatgaaatatctgtgaagctcactaagtggtaaatgtggtaaatattcgtcataggcctttgtgaacaatgaggcaatatcatcaagctcggacttgtgtaaaaggtcaagtacctccttgaaaagtccaaggctcatccaaacgccaatggatttcaatagttgattattactttggagatggtctgcccatcttgacaagacaattaagcaatcatgatctggtaaaatacttttagcaatacgggcagctttttcccacatgtcgaaatcttggagaatacggcatgcctttaatccttctccaatggaacacaatagctgcacaccaaattcaatatcattctccttcttcaaagaaatgagtgagcttgcaacaaattgaacagtttctctgaaatgtgaaggagagttggaggcagctaaaacagttgcatgtaagaaattggcgtacaaattcttactgtcaagtggtgtttgcaacaatagtttgaccgcttggtccttttgcaatagttcactctcatttcttgcaatgaaagagaataaatcattgacttgctcagttggagcacctgatttgagtttgtgttggagagtttggtcgtgttgttgcaaaattttcatttcttcatttctaacagattcgttatccctcaacaaatcaaatgtggttggaagagatgaattcaaacagacattagcatcaaatctttctaattcagtcttctctgtgaagaagtgttcctcttcctgttgtgttgccgtttctttttgggcctcttgatgtgttggagtaatttcttgtttggagaattttgttaaaaattcgatggccaatctccaaaattgctctgcaattctatcaccaaaatattgtgctgcaagaagacatctttcagcagtggtggtagcaggatttttcaatttgtgcaaaatataatcaggaatcaagtatctgtagctctgcatcttgtcatgaaggctgacagatgcttttgtgtcagtaatcacttctcctacacaatttctgaaagtgttgggtgagtcaacaatttcattctcgttcatcatgtcatcgaatgataacttgttattctcgatgagagctctaaaatattgagcttcgtcattcttaaggcagcaaggtgtcttgataaaatcacttcggctgtggaacatcaagttggtattacatgtggtaagctgaatatcaaacactagaatagagcctgaatttgtggaaattacaggataattgcctcttccccaatcagctgccaccgccttaacataggctggagagctggcaagtttaacattttgatcaacgtcccaaataccaaaatctccatccgcaaataacaccaaaatatgattatgctccttactgaacgctattttcttaataagacctttgtgtgtgtgcaaaactcgagacttctttttagccaagtcccagattgtgacagttcctacattgtctcctgaaacaagaatgtcgttcttccaagctaatgcagagactggagtgaagaagactttctgttttttaacgtcaggctcaaccttataattctcaaccttgtagaaatggagtgaaccatcacttgtggtaaagtataacatttcacgttctggatgatttttagacagaggaatccactcaagagcagtgacattggtgaatggaatcatcctgattaatttcagtgtgtctagtctccaaacctcaataggtctatcttgcaagattattactagatacttgtagctgttactaactcgaatacccttgatacctccggcacgagatgattcttctcgcttgttctgatcttctctgttaatgtcaatggttgtatgctttcctgacaggatattcacaagtcgaagctcattattctttctgtcctttttcttttcaaacacagaagaagaaaagcacaataatgagttgggaccataccaacgaatacctaatactggagcgttgttgaaaacgtcatgcttgactttgagagatccagttaacagatcgtaaatcataattagaccattgctcgtaccaacagccacacgatcatcaaatggagaaaccttaatgctgctcacagtagacccagtaaactctgtcaatccatcaagcatccactttgagttaaccttaatttttgttgatgaagcctcaggagacgactcacctcctgagagcatcttgttcgacaagttcactcgccacaaccaaatcttaccatctgcgcttactgcagcaacttttgtgtgatcgagtggagagatcgatacaccataaagcaatcctggtctatcggcaccatgtttcgatcctcttaccacgtcacacacagtagaatcatacttttctccattgtattcccaaatgcacatagttccatcatcgtgaagtgagtacattactttaggctcatcttcaaacgtgtataaagtttgaaaatctgatcgtcctcccttcaaatgtttaccatgaatggttgttcgaatagaagaatcaaaaacagtgacctccttctttgccacaacgtaaaattgatttcttgtgtgaggagagcataaaaagtccttcaatgtagtctgagtggcaccagtctttttatccatactaccataaagtcttcgttgaatttcggcaggtttctttttgacatttaaatcgttcaagaaataggtccatccactctcacttggcaagcaacatgttttcaatgtgaaaggatcaattgaaaaacttgtgattgtttctggaaactcgacatcccaaattctcgttgctgtttgtacattccaaagagaaaatacattatgtgctgacaagctcatcaaataaatattgtctccattcaaccatttcaattgaacaattgattttttggtgttgccgttatcttcggcaaaactggaaatttttcttgccttcttgtagtcccatataacgatgaatcctccctcgtcaccactcgcaatcatattggtattgcctctctctattcctctcgatttgcacatgtcgcaccattccacacaagttgttaaatatctgtgaccaaacaaagatgatatttgttgcattgaaaccggatcaaaaatcatgacataagtttgacagcagtaggcaagtaaattgttgtagccccatgatgttctattcttgaatcttttgaacttttctgcattttcctgatacacattgttcagcgaaaacttttcactggaaccaattgtaaagctactgtccattaaaggaatttggaaaggtaaaactgaagagatggtctctttaccagctccaagtatagaagaaatgacatttgatcctgtggatcctgatgatgaagatccgcccaatgaattcaacacattaccaattccaccttccatcactggtattctgttcggatcataaattggaggcccaggaatgatttttggctgaatactgggtacgcctgatgataccgtggtcgtgttggatgcagtggatgagtttgaaagagaatgcacatgaatcgatgatgatgaatttacaactgtgctggtgctcatggcagacgaagaaatattttctgctggcaatgatgaaacaccatcgagacttctttcaagagcaggagaagaagaattgtccagcaccgacatgggtggagaggtgttgctcgttggtgttgctgttgttgttattggattggtagattccccttgatccgatgatgatgagatcattgaaaaaccactttcatcagcaacaaaactatttggctgttgttcggatgtcatttttttgtagattcgagcccttaaaaaataccgcaagatgatcaatagaaaagactctgacatgctccacagcttggaaaaacggttagcaaagattgaacaacaaacgcattacattatctttaccctccaacaattaaataacatactcgatgaatacatacaaaaccacgaggaaagtacacagcaccctcatcacattactttaaacacacaccatccaccaattgaaaccgtcaataattcaaatgttgaaaaaccagagaaaaagccaccagaaattaataccgaacgaccaacgccactaacacctgagaaaacaagcatgagaatacaacccaagaaaccacgtacaaccgtcaaagccaagccaagaagaaaaactaaccaaaagatgaacaaagttcaccaccacgttgttcatgacgacgatgaaattggacaagcacttacgatccacttgaccaaacatcaactcgacaagaaacatgtagtggttagaggattaagaaaaaaacatctcaccctttattggatccaggattgctctccaccctgctgtaccacgactattatgacatgaatcctatgaagaacaaactggtaatcttatatatttgtttattgactaatcagcactatttactaattcgtgacctattaatatgattattgataacccaatattactaaccattgatatttcaaaaaacattaatagaacaatccttgcattattttcgccatctgttcatcgatggacttaacccgctccatttatagcagttgctcaaaacaagcaagaaacctgttaatatttgaaatatccttacaaaaacatttgacattctgaagttgtatccttactaaacgaacgtctaatgtaacgtactgaggcaccgaagggccaataaataatatttaaatttttttgtagatttttttaaacttccttaatcaccagtgacctccaaaaaaaatgttctcgaacgttcatgaaaattctgtgatcgttagcagcagcaacacacatgtgatcctgcctgaaattgagaagggtccaaccaagcatttccaacacgaatccgatattttcttgtattttaatgaggaccatcatcatggtcataattttatctcgaacaaatttcaggtatattcggcacaagccaatggtcctctcttgaaagaagtgaactttactcctcatccattgatcatgtgttgttccgaagcgtatagtcagcattatccgttaattctctctcctgacgatatttggcttctcattgctcagggttttgccaaacatgttgaaattcattcgaaacaattacgatctcaattcatttctgataattctgaatgcgagttgaaagaaaccatgaagcattctcttggaacagctacgagttctcaagagttaggaaaaattccaattactgtctacttggaaccctatatacaaaataagaatgatcactctagttgcaatgtttttaaacaagtggattggaaaggagttgtgaatgaaattgtttcaaaagtgaacgcacatttgattggagataccctccaatggttacaatgcaatttcacaacatcgacatacattgaaaaaacatgctctgaaattgtcatgatgagtgcactaaaaaattacttttcctaccgtaacatgttcaagtgtggactgcctagtgtgaccttactgggcaccttgcaagattgggaaagtattaaggaacgaactttgcaattggaacaatatggaatgcaattttggatcaaagcattgattcccattttagatcaattcattgagacatacaaattcaactctacgaatgacaaccctcttccaaactctttaaaaaagttttggaattccattgcactaagcaaagtaaaaagtggctccaccaaagtcactggatggatctcgtactttttcccatacaattcacagaatgaaatttcggccgatttgcagaacctctccgaacacttcttagatcaagtcgatattcatgcatggggaaccaatgccagcgaatttccttctgggttatcctctgtagatgttgccgttgaaaatagtccaatagccaatgtccattctttgaaatatatggcaggctttttaggatatgattatgatgaaacttggaagggattgaaacctcgaatgggttgggtcattgcttcagaaaaaaagaaataactttatgaagcactgcaacaagatcgtatttcacaactcaagtcaccttttatcacagtgttattaatgataataatacaacaaatcaaaatgattcacattcgttgaactcggagctctgtaataatttcacgaccctttattcaaaaaaaaaatgtctttgaaatcacaacctcctctccagccacaacgaacagtattattcatgggcagtgctcgggttggaaagagttcattatgtggctacattctactcgatcataaaccgaatacaatttcaagacattgtaaaagaattaaagaattatttaatgaagatcgggaggaggcagtttttggatgttacgggaaaaagagccttcattgtcgagaagaacaatcgttgagaattgccatccattcctattatagcccagagattcgtatgatcaatgataactgtacgcccacgacggctaatcatatcaatatgaacgaatgggaagtgaatgaaggcttgactttcctatatgtgtcttccaaaaagaagaaaattaattgttttgtgtcggcttgttttttggctgatattggagtgttggtggttgatgtgagtaatactgggtcgagttttgaacaggattttaattctgaagagagtactatgaaacatcaattacaaattgcccaagcgtgtggaatggaaaatatcattgtttgtttaaataagtgtgattgtgaggagaaatcaactactgaccaatgtaatcgtgtgtctacatgtgacatttcaagtttgtgtgagagttatcatcaagtgactgctacgattcaacactatttaaaacaaatgaattggaaacaatcaaacattttctttattccaacgtcgggaacaaaaggatacaatgtcacggccagacatgaaccgtattcgttttatgaaggaccttctttgttggaagccattaaagagatggcagtgaagagagaagttgaatccattcttgaaaaacaaccttttcgatttagtgtgtataactgtcacagaataggtaagcagaaggtcaataacacgtttggttgtcaataagtgagaatttttaaggtggagttggtcctgttgtcacaggtatgtttcgttcaactatgaccattttcaacgagtcaattgtttcttcgccttatcaaaggcaaagttgaaagtggaatggtgaaaaaggcagatgttttattgactcatgtcagtagtcatgaagtgaaaagtattgaaatagcataccatcaaggtaagtaacatggagtacgatcattgttcatctaaaagagttacacaaaattgctatgtgttgttgattttagtggaacatgcaagtgctggagatttttgttccttgtgcttgagaaatacatgtcacagcgtcatgaaattttggagatttctatgcaacagtcgaaccgagcttgaagattttgatagttttgaggctatcattcgcgtattgtacacaccgaaccaacaagtacgtgctggttttggatgtgacttgcattttgcaatcaatcattgttcctgcaagttggatgatattatttcactactggacgacgacatgaatgatcatctattaagcaattcaaacaagaaaatcatttcaaaatttccagaaggtattcgagcagcacagatcgcccaagtcagaatcaggacctttcgttccaatttcaacaagctcatagcactcccactaaaaacattttctgattgccctcaattatcgagaattctcctagtggaccaagcaaagagattgttagcgtttggatatgtgacacatttaaacaggaaagctcggaaaaatcttgaacaacaggaggatgtgatttattgagatgatgaagaagttggtaaaagtagtaatagtaaaacattaaatgtttgttgatgaattgatagtgtgatgatgatgacatgactcataattgggaaggacgatgatgatggaacaacacttgtcgtcagaaaagtgtcaacaacaagaacttgtcgttaagcaaaaatcttcatggtggtatcccatgaacctgtggctaggccatgaccatcaggtgacactgccaaacaactcacacgattatcgtgtccatttggaagaccatcaagactctgtaaaatagttcctttcaaggtatcccaagcaatgactttcttgtcttcatacgatgcaaataagattcttcctgatttgctaaaactaatacaagtcacaccttctctgacattatcatccgaataggtcatgacttctcgtccagcacgaatgtcaaataatctacaagtacaatcatcagacccagtggcaaatgcatgtccatttgggaagaattgaaccgagttaatatcaccttcgtgacctgtgaatgtggctacacacttattcattcgaatatcccataattttgctgttccatcacaagaaccgctcacaaaaacgttactgtcacttgttggtgaaacagaaattgacatacaatctccggtgtgttcttggaagtgtgtgacagcatgagtcatttcaatatcccagaaaatgcaactctgatctcccgagcttgtcaacatgtgacgatcactagtaaataaacaatcactcaaatatccagtatgtcctacgagttgtctgtatggtttgtactcatttgatgaattttgtaattgttgagccaccacagcaagtgaaactgtttggaaattccattcaatcaatttttcacattgtaatacatatgtgtgtatatatatgtgtgtattaatgtatatatgtgagtattaatgtatagatgtatatatataaatgcgtttgacacaccattcgtttccatgatatggagacagaacaagtggtgattattatagaatcagaggatgtacgttgttgatatttgaaatatttgaaacatttcaacaattagtattgttattgaatattccatgtgaaaaatgagtaaaacatgacattcttttccagatctttcaatacttacaaatcgaacaagtattgtccaaaccacccacacaaacataatttccactcggactgtaatcacagcacataatgccacgacttgttaatggaattgcactcaatttataagtagtcatggcatcccacaactgtttccatgcgcatcatcaatagaattcacatttgtgtgtgaaatttgtgatccatatagacacatggataaagagtcaaaagtgagattgagtgtatcattttggaattgatgatagttattgtagtatt

SEQ ID NO: 4816 - DNA, 4800 bp, Naegleria lovaniensis
  source 1..4800: mol_type = other DNA
tgattatgaaacttggtcaattaagtccatccaaacccttaccgttaagacaagcacaaccatcatcgaacaagtccaatgtatcaacgactccaggagaaccttattcacagtcggaagaggatttaattgtgacatccttgcggaagggaatgaatttggaacaaatttaccgagattactttacacaccgaacatttcagtcgctgaaaaataaggttcgacggttaagaaaaaggcaactctatcacaaacaacaaccatcgaagaagagattgaataagagaaggatggttcccaattccactgtttcgactgattcaaaggagttaagaaaaccgttttggcatgatgatacggttgatcgtttgaacaagatttgtcccgtgtcatgttttgccaagaatggtacgaaaatactgacccaaagttggtttaccctctccgttcgccaacgatgtccatccacaaaaccacctccgagcaagaaggaattggtagaaaaagtgtggagtaaatcagaaacttggaaaaagacgccatgtaagtgtgggaattccaagtttaaaaggacagtctgctcgttcaacggacgcaagtttgggtcagaaaagaagaagcttgttcaggaattcaagcaagtatctgcgttggaggagtctttaacaatggttcaagagaacggagtgagttcatccacgactgctgagaatgaagtgagttcatctgcgactgctgtgaacgaagtgaattcatccactactgcagagaatgaagtgaattcatctacgattgctgagaatggagtcaattcatccactactgctgagaatggagtgagttcatctatgactgctgagaatggagtcaattcatccactactgcggaatcaaaggaaaaagctgatgacactattgagaaattgctaaaacaaatttacacctccttctcaatctcaaacgaagacaattattttgtgagaacaaagaaagtgagattgaaactcacctcagaacaaaagaaggtctttgaaagatttttcttcaattctaaccatgcttataacgaagcatgtctccttcatttcatgttagagcaaaacaagggaaaaacactccttaccaccacagaagacgattactttaaaattttgaagaatccccaaaccaacctgagattcaaacaaactaggtggctatgggatcaagagttgaaacattgtccagcagatattaaattgaacgctgtgaaggattttgtcaaggctgagaaaattactagatataacaataagcaagcagcagaaaaggaatccaaagaggctgctcgaaaggccaaaaaccaattttttaaagatgttcaaaaaggaaagaaggagatgattactgatgaggaaatgaacgaaagatttaatcccaaacattttactcgacaacctcgtgaattcgaaatgaaaggacgaagcaatcaacatccatatcaatcgttcaaggtgacaaacatttcattatcacaggaaggagtgttgttaaaacctaccttttttaaagggaatgaaaatgcatgtccttccaagaaatctacggatcatcttttgaaattttattatcctgcaagagcacgaaagtggttaaaggaagagattggtatgtatatatatgtatttcgattttacttacatgtgatttgaatctcttacatgaatgtgattgattcatgtgattggaacttttctgaattctaatttttccatgatccgtctgcccattgcctacccaaacctcaagacaacaaaaaattttcacacgagacaacctttatacgagaaagaggaagatattttgtttgccttccagtccgttatcacaaagctttaactcgacaagaataccaacggtttgataaaagcttttacgagtccaattcgaacagtggaattgaatatgacacgaaatttctcaaggactgcccacaaccttctcaaaatgaactcagaaaggaatacattgcattggatccaggtgttcgatgcttcatgtatggttatgatagtaatggagacgcgttggagtttgccgctcaaggagaaaacaccatactcttttccctttctctaaagcaagatcagctcaggtctgaaattgccaagaacaaatttctaaaatacaattctcggcaggaacgaaaattttataagggtttaagaaaagccttaaaaaagaagattagaaggttggaaagcaaaattagaaataaggtgaatgatatgcataacaaaattattgactatttaactttccactattctgaaattataatacctgaatttaatgtcaaggccatgattgctagaaaacaaaaacaaaggaagcgtcaaggaaaagaagataccacgtgtcaaggacaagaaggttatactaatggccaaacggagaatatggatgtgcgaacagaacctcttgttgcatcgtcttcaccattcgaaggatgggaatcaagggacaccactacgagtgaaaccaccaccaacacctccgaatgggttggaagaaaaattactagaaaaactgttcgccaaatgttgcgatttagacactatgattttcgaatgaaactcttgcaaaaggcagaaatgcgtggatgcaaggtacatgttgtcacagaacaatatacatcgaaaacgtgtggaaattgttcagtgatcaaggaagacctttatggaagcaaatggtttcattgcaatcattgtcacttccacatccctcgtgacggtaatggagcaagaaatattttgatcaagaattaccatcatttattacattggtaagttgaagagacaactaaaatgattcatcattcgggccatagatctatataataataactatgtgattatcattctgtcaagatgataattccgtctctcgtgtgagagatgagtatgtgatcggagcactttaaaacaccaaaaaatcattgttatcattgatggagtatggtgtgctctccgagtaagtgttgttgttgttcattatttttaacgcgtgtgactttttaattttgtaaagacataataagattaggttcgacatgcgtattgagattttcatcagataaaaactttgaaaattattttctaattgagtagaatagatgaagacatagttgaaaggctctcatattgaaacaactcatccgttcaacattctcaattttaaaaattatttcattcattctctagtggaatagatgagaaggagacttgttgttggttgtttgtgtgttgtttgaggtcgtgtgacagattccttccgctgattctactatttaaaaaatctttgtttggaaattttgtcgtggcacaagtgtggtggaggccagttgtatctagcaaataaataaacagtttacctgataaagaacacacaaatagatagatcattgccttgtccatttcatagctacctaaaaagaacatgggaatgcttggtatcaatgccttagcaacaaccgtgacaactgacagttagttattttatgcctcaatccgactcatgatctctttctgtaacatcaaaccaactctcaccagcattataggaaggaaagtcaggagaaagatctatactcacttgatcttgttgtgacaatgtagaagttccatttttctttggttttcgacttcgtgtcttcttttttgttgtcgtttgagtttgtgaatttgaattggttattccacttccattcgatgctgtaggaatcgattggttgacacttccagatgaaattgacattgtttgattattagtatttgtgttatctgattcaaaatgtccgttactagtcatgctgctcattgatgttgcgtgattgtcacgatgactcaaagtagtggatctttcatgatacgatgacgacacatttctagctggaatttggttggattcactattttgttgagttgaaattggtggtggaaggagtgtatttcgtttaaatgtcgatgttgaatttgataaatttcttggtcgagaaggaatattattgccaacaaccaccactggtgaaatggttgtgggtggaggtggaggtggaatcataccatattccaaattataaggcattgaaaaattggtttgtcttggagaaacgggtacggttggaatttgatgaagattgccattattgttgttgacattgttcggataggaaatattcgaattggattgattcgaagaggatgaagagtttggattagccatgttgttgttaccaccactactcgtgttcgtggtattcgtacttgacggaattcgttgttgcatttgattgtgcatggaaattgcgactgcagccggatgtcgaaatccataatagggattcgaaagcattagggtaagattggacagattggcagagagtgattttagactatccttaataccgtcacaggtgttggtaagatttcccaccgattggataatgttattggctgtctctgtgaaataggctgtggaggaagacgaagtgtcgacgggcagtatggtacccgaagaggatgaaacagatcgttgatgtaaatagggaggagaagtcgtactggtggtcgaatgatgactgtcaacatgtgactcaacattcgatggttgtgcatgtgaaggaatttgttgtgaggaagtattttcatgaggaggagtgtacatgtacgaagtgggaatcaatttcgcagctgcaagaattttctttcgaggtccaaattttgaaattcccaatttgaacaagtcggcatctgtaagaag

SEQ ID NO: 4817 - protein, 132 aa, Naegleria lovaniensis
MSWTPFVDGQFVTPSQGLIQKALIMGRDGTIWGVTAGWNVTAQEAKTLAGQAANPSSVPSTGITLGGVKYMGLLADEENFQGFSSAKKQGVSGVVLKGSIIVGLFGEPHKNPNVYSYMKKIADQLVEQGTLQ

SEQ ID NO: 4818 - DNA, 4748 bp, Naegleria lovaniensis
  source 1..4748: mol_type = other DNA
ttcatcgccatgcaaaaccattctccaattcttaaattttttcaaattgtacagcattccactactattgacgagttgtttcttaatttcttttttgctttctgttggcgctgatttcaagcgagcagcataactcaaatcatccatggaatgagaatgctcaacttcatgatggtcctccgtgactacattcatgaccacatctacgaaatttgacatttgtccattcactagagctctcaatttaggcagtgtcacagttggagcatgagcataacttgtaaaccacaaaaagtcttctcgacgatccttaatcgaattcaaaatattatctattttcaaaatattctcaaatcggcttgctcctaaagcgtcaataataataaatacaattttttgtacatttccatttagaatttcgtcatgttgattgtggctcatcatttctttgaaccactgttcattttcagcatccattttttgaatagaatttgttaatcgttgtgttatgaattcaagtctagatgtagcttcttggccaagatctcctcgttgttgggtgcctcccatcggaaagaatcccatgaatgccaatactactccgaataaatacaatacgaataataataataatatgaatgtcgttgatgatttgataaatttaatcgataatattgaagaagtttcctccgatcggaatgacaaatatgacggcgaagaattttcagccatttttttattaaaaattaacgttgaggtgttttgaaatttcacaatcgcaaccatcttcttcattatgtagaggatattgcacatgactctcccacaaatgaacatcaatgttacaatgatttttgcaaataggacacacttcttcgagttttgttgcttttttcacatacttatgagaggtgaatgcttgttttgagtgtggagtgatttgaagcttgttacattcctcttcatacttcttgaaaaggtcctgtgttggatggtcttgataatacacagctaaagtattgtctgcaggtatttcaagttgttgttgttggagtttgatttgttgttgcgtacgtctgaactgttgtttttgaattgtacaagtggaagatggacgacagtgcctacgccaaaattcaataatgaattcaatatcctccttggtaacagaactttttccagtattatttggtgtagatttcaagcctaatattgaggaagtatattttctagccttggtgatggtagaagggtgaacaaatttgttcgaaagagctttagttcatgctgacaatactggctttctgaatgggcttgtgttgggaagacgattgtacaacttaaccgaatgattgatcaatgttttggattgcaggacattgtttctacccaggttcagattggtaagcagtaggaagttttggcaagttgaaggaccgagatgtcaagctgaaccatggattactggttcgtggatctagatgatattttgtccagtcttccattcaattgtcttgctcactttcttgttggtcattgaggatcattccaacgtcattcagtgaataaagatttcttgttcgatggcattatgagaataagtgtggttctatcatttgtagattggaaacatttgaggtaggtatctgcagatgacgagcttgagggctcaaaagaaagtgcttgagagctcattctcttcacacaatcgggtctgggaaacatttcgaacgcaatttttggacaattcgacaatgacaataccaagaaatgacaaagatgtggacgaaatgatgaagaagagatgagttgtgatcaaatcacttgaacattaataaaccaagcatcaaaggttgtgacaatagtatttgcaaacacgtttaatgtgatttgattttgattgtttacttgacaaacacatttccagaaaatgactgctgttctatcttgtcaccaagacatgtcgcaataccatgtttcttcatggcaacggtaacttgccgagaaccaagcccctcaacattcaggacaagttgtagcattggatccaggagtaagaacatttcagaccacttttgatttgaaatggggctaaggaggtgccgaaagaattggtagattatgtttctcgtatgacaagttgcaatcgaagtggtctcaaccagaagtcagacattgcaaaagatacaagtacaagagagcaggaagaagaattcaacaaaagattagaaatattgtggatgatctacacaagaaactgtgtttgtggctatgtcgaaactaccaagtgatcttacttccttcgtttgagactctgaaaatggtaaagaaactccataggagaattaatagcaagacagcaagaaaaatgttgacttggtcacattatagattcaagcaaagattgcttcacaaagctagagagcatccgtggacatacatttatattgtcaacgaagcgtacacatccaaaacttgctcatgttgtggacatatttatacagttggatcatccgaagtgtttcattgtccatcctgtgactcaatttttaacagagatatcaatggagcaagaaatattcttcttcgattccttactactcaaagaattagtttttgagcaccttgtgtgcgttgaggctcaatgggtcctttcccctggctttcactcattgagtgtttgcttgcaagataagcactttgttcgatttgtttgttttgttcaaattgttgatttaaataaaggcgtgattaggtgtattccattcgtaacgaacacttcgtcctgttgatctctctctcatgtgctgaaatgagcatcaagggcttcacaggaaaatcattgaggctcaatcgattgttgcaattttaaaaaatgagaaccacagcttgcttctcgaaggccatttctagagccttctcgtcccataagaatttttcatcaacaacaacaggccgatgcatgataaagagcaatggtttgtctcaaatgacgtgttcctctcgtaattattcaacaactcttctctcctcttcatcatcatcccaaagtataacatcgggttgttccagcaacaattattcatcatcattccttcaaacaatcactcaaaacggaaagagaaataacttgtctggattcagaaacgtgcgaacaacagccatgctctcccaagtttttgctctgggctcttgcgttgatgatggtacgtaagtgtctttgcaatgaatagtgtctgaaatgttatcagatgattgctaataatgaattcttaccgtagctaacacatgattgggctacgatattgggttgcttttgaccttctaggttggtcattctctaaacatcacgcgttccctaattattattattattattttgttcagttcggagtaaattgttgtattaatttctacaatgataccttcacgaataaaggtgttattatcaaaccaatatggtcttccaagagaaatgattatttcagtgccttctcatcaacatggaaacccacaaaaacgacatgatattcttttgattaatcgagatgattcgtagcattcattcacccacacgacgctcggaaaaagttttatgtacattcaatgttttattaatgcataagagatgatgtatcgcttattgcaaagttccttgctcaaccaattgatcagcaatcttcttcatgtacgaatagacattaggattcttgtgtggttcaccgaacaaaccaacaatgatggatcccttcaacacgacacctgagacaccttgcttcttggcagaggagaatccttggaaattctcttcatcagccaacaatcccatatatttgactccacccaaagtaataccagtggatggaactgaagatggattggcagcttgaccagccaaagttttggcttcttgagcagttacattccaaccagcagtaacaccccaaatagttccatctctgcccatgatcaaagctttttggatgagaccttgggaaggagtgacaaattgaccatcaacgaaaggagtccaagacattttttgttttgagtgttgacttgatgctgtgatggcttaaaacgtacttatgtgtgaaaaagtcgtcattgttggattgagaggtgataacatgacgttaaactcgtcattcggcaaagttggcaattcacttccaatacaacattgagtttgttctttttaacactgtgtgccacctgggacaagcttgaccatttacaatttgatttgaaaatgtgtggtttggaaactgataacactttcacacatgtcaacacaatttgaaaaaatcgtaaagtgaaggttgtgtaattcgggttaaatgttggagagggtgtcgttgacgattcggggaaattcaatgaaatacatgatcgggtcctcattgattttcattgaagagcgtgcataaggtctagcttgataacattaatccagtaaggttggttgatggttataatctagaagagatctctcataatgatggttcttacaaccttcgtaatcgatgaaaaagtatgcaaggaaggttgattctattatacaactcggaactgaaaactaaattaacacaaacgacaattatgtaaaggtgtattttgatgcacactttccgaaaactctaatttgatctatcgatatgaaagtgtttgatattcacacatgcaagcttgatacattgaaacatttacaaaggatcaatattgtattaatttaatcaaactactac

SEQ ID NO: 4819 - protein, 336 aa, Naegleria lovaniensis
MNSLHPTNIQKSHHHNTTTRSHHRSSSTRVGSNHNNTDPNNNSHSPPPHTEKFVHPEQSTHLWHLFGFALGSFTISTILCITLAVVVALGVSSSKSPRNCYLWTSNEEIQNHLLSEQSPIRVLLEDVKMKENDSFVFTRDMFSRGEFSISRFNNMTSEELIREQFNLNGKGMNVATLQLRTWSLPATMDLIWNDGKGVSHAVGGFFALTDTITIGRYASNCMPLTGESSVSTNQSIYGATINQQVKDYVKSFFIIDGKGQPRAVMQQRVDFISYELPIVRYENSTSVIAMLRKNYLNPNEQWILTIKNPLLESEMTDGFGYNTLFYLIGYINYREK

SEQ ID NO: 4820 - protein, 505 aa, Naegleria lovaniensis
MQNSEPNKISLQELIQRLEWYRNQSLVQDHQEENVDELKHDEGEGSDEEEEPQVADSEEEEEGPMKKQHINSEIQFLFNASQFMISNRLKKKDGEKVKLLIQAMKNPDSDEASPFIFPLAQSRKLQKNIIKNFGAQLLNQCLSDFISKPHLKSHTSSEPSMKKNGKMEEHGSEENPSADEEQEETEIVNKHDSSVHSGNIYHNAQEGNKIEVDIHHLYQQSVQSSRDDVNLFEKMFKTYFQQKAPHVFREDFCGTGLLCCEWAKRGVENISIGIDLDHDTIQWGRKHNMETKYSKFNVSDRIYTFTKNVLEFNWEEELRDCELLLAQDEDTGKCYLRKADIICAYNYSVCLLHKRKDLILYFKKVRESMADYGSIFLLDLLGGAKMLSVNDRERVRKDLPGGIMYEFEQTSYNPITDILTCHIHFKLSDHWIKKAFSYQFRKWGVRELKEALDEAGFSKVELYWASHDRDEDNHDVSGSLQFEKVKNIEKIGQSGSWTALFCCLK

SEQ ID NO: 4821 - protein, 420 aa, Naegleria lovaniensis
MQQQGYHFSKNTKENIPTMHSLHEITSIPVSSSSLVLKETSTWESVKIASMAATNVNLTSGKIPEAAENIPSLVNSILFILVLSVLFFIFIAFYMKSRQQGMKRNQHILFLFVAVLIIIEILALAVRVVYNGTALYMNGIEWTELPNLLDYRVVLWVSGVVENALAFSEVVTINLITGFVQSVFLTTAASAGAMSRKFHLILKWTLLSVNLCFCFILGILNLINAIMNLLVKMSLLSKSVSLPLQIVLFVIFFLICVLNLIVFICVSSRLLYVVKKTSRQVSNAKDEKSRNSQRPFTKIVTLMLGMILSAFLQILSIICSFITSTFAGYLHVLDYFLQAFGVVLFVVFVLLLYNPLWKEESMKSSSTSYYESSENKKIPNGRNQKVSTDDTEDEPKSETVETKDIPLNETTLEQSMTVVQ

SEQ ID NO: 4822 - protein, 764 aa, Naegleria lovaniensis
MISTSTLLQEWDSQFLNVITQAYKTMLKSNNNNHDESNHHSSSGCISEWTLMNQIAEQVAEITSSSYALILKKVYPGQHDRAGCDTQPPPSLAAIGLAGWHRVTAKDQNITIPPKLIFRTQGSHALFVTAFLENRHVVCNEMPPRGNKPTAHPDLENVICSPICYGTEPIGVLIIADRHGGYNEEMTRPMTCLCNSLAHIIKVLELHCGSEDSESSEESSDTQSHTGGSNNQSCPHLSNNTARVDMEGKFEKENELLKSAELSLALFKAVQDSIIVLDKDLCITSMNPSAKDFFNYQPGQKNAHISELIPDNIEQQLFWSNFTQKQGIIGFKGKALAKRRIAEIANVSSAIHPPQTMTEANTTYNFEYVLTPIALSVSSFFFRKEPYFAITIADESTKEELKDKIKFLAFLSHELRNPIQVIISGIHALIDSANCEDTSVIASLYSSVEFITHLLNDMIDLSQLQSGHLKLCESSFNLREKLEQIMNMSYFHQNDKLKIYLSIDDNVPNTIYSDATKFQQIISNILTNSCKYTKQGSVHLKCSFNEHVSPPLINFEISDTGVGIAPSEISLLFNLFRRLDKTQSETIGSGIGLALSKLLCDILGYTISVQSQLGVGTKFTVSVPYKPEEKLTCTRFANKSSQTNTIEHKRVLLVDDNEIIRKSLKNMLRHCVCEEAENGAEAVHKCETNQYDFIVMDDIMPVMRGCDAIRVLRCEKGLKTPIIALTGNSLQNEVAELERAGVDKVLLKPITRSELMSVLCQLLP

SEQ ID NO: 4823 - protein, 258 aa, Naegleria lovaniensis
MQTQSSHNHMNPSNPEVPPPNTMYYSHMVQPQQPIMNYPNATQPSHVVVEMMAAVPATLPITKSQYFASRMQALGDQKLKLVIQEDGIWMSFFTTIVAVLLFPVAICLECLFSELCVVVLAILIVYLAIAFPIILLAAPLVIIYILWTETVMTVILDDAKREMSIEVRKRYFAESRSNSIVTSCQIPYSDIAQVLLSKKKRASKQKVLLETRQGQQYEFSLGMKEEIAKEELDYLTKFFQVRGVVLGECFKQTPQMLP

SEQ ID NO: 4824 - protein, 1257 aa, Naegleria lovaniensis
MAQVETRRNLDREETPSFDSSLEDYSSIRTITRKDGSCHEHGSLDSSSSTFLKLNYEAHHFVPHEDGKRSSTASLLVNTCSSCSFSPLYNHPCTNHSERPENIVISNNHHHSYTHETSGNFFSLSLWPKTMQTQKSFGPFPFIYLLKIMTISMMVMCFGFLGTSTMVEAASFRFMSEFTKTANTTVLNVLPNSTTTVLNNVTTTNTIGFGYFTYTYETDSLSWQILMDTELPSFSNSSSVISLRFWRLVHTNVLLTQYAKTLFVPKANLTQTLIEKNLLNSTTGVTIVPEKMLYPLNGTTKGKITNTTLYLSVPEMFENSFVVQFFELELNASLLQDNSSENVVPMSDKILVKFSLFKGKNPTYTYSVLEKLKNALRVVSVSTVAFKNLCSSASPVVAFAWNSWKLWFVLFVIIAMLGGLVLSWWKPYFVVFLALVVLNISGVINVSQTLAGFSNDGMLTVLVLFPIVQPISENSLVLKISKVVFGSPKYGLWLCMLRVCLFIALVSPFINNTPIVVTLIPIIKDWARVNNIAPSKFLIPMCFMTSAAGLMTLIGTSTNIVTNGLYVAYGFTPFTFYEFFYIGSILSVVTVIYLCTFGLWVLPNKKGGMFRLARERGEQFLTKIAVDDPNSPLIGKNKHAIIQYLGLEKLEVVEIIRKKQRLSTSANPTVTESTNADTPKVSIATDMVAANEDQSTEDPVELIVPVPDDLTIILGDVIIFKGHPNMILKLHSKTGISESLPDEGAGIIHTMLGTADMQMEKQAAVNISSSQQPNVQIENLPTTPLPADSSDGNLVVEISESSEINSSNDFIHAHDSSTPQLEVAPPIPKATLKSLLSEHHGLYEAALRKSIHEEYTQDATASSSLDVGVVNEEQPPKSSSTEIAETQTPQNESAVPSVHNNSSTPQMTTPASVDSSSEDRSKSKSKKRLSLAWFKRKKKPEVEAEQDTTEKEPEFFELIISVSNPCIGFSYAEFEKRYGVVVLAVRYVGLETKTDVTDFKTSNVSTGDTLLVIGRGEFYAKWHESKDFYVISRCNVNPKENKPNKFIVKIPFTNKEFNLWWWEHLIFPIFIAMIACAIAGYSMLQCAMVTLCVVIILGLIQPIKALESVEWPLIALIGSSFGIGTAITQSGMGEAFAEVVRLMNIPNFLLPAVVVLITLVVTAVITNNAAVAITFPLAMAVAIRNGLNPRCFAMCVCIAASSVFATPIGYQCNMMVYGTGGYSFLDYVKSGLPLTVLYFVCISVFVPLIWGLEVPNF

SEQ ID NO: 4825 - protein, 588 aa, Naegleria lovaniensis
MQPVHSTLLQVTTEEEEQQQQQQPLISEYQATPNVIHHENQMLNTYFGNMTTSPSRRRPLLHENIPNKYHQNSFPPRRSSMLLLPNMTSLYTNKPSVPMTSRRPSTLSDMGWEKHKNRSLPFTPHTLPLLFPTLSDQEVPHSYPHLKQEGAPRREKNTIMKEMEPVTTTASSTNDVNRHETLREPHVLHGATLLSSQKHESHEYNLREMLLDTQSLLQQGKHFFLIGLGYCRIFHTIKEMIIYLSKQEESTEHFWMDCQQCSSEDMMELQYYFNLHPLTVEDCVNNDSGEKWEAFDNYLFICITGQTTGRVVLNEYLPCYLNMVIFERCILTIHDKPIEGLDLLINRIEKEFEFNQKKKDHKSDSNKTTNINTTSPSEQHSQSFFVLTPSWIFYAYLDAIVDVYVPKVDQVIRECDTVDEFTATLTLSDKEDLLWRIAFNKRRVAILRKLLLPKQKMVAFMVASKLPIPFLDPEAKHFLRDILDHLKQCCERLDMARDSFAQTHSNYLSRVHLDIAQHSQATDVFMNRITVFVVLLAPVTLIAGIWGMNMKVPGQGVKNLYWFFGVCSAMAVVALFMVILLRKLIMNI

SEQ ID NO: 4826 - protein, 194 aa, Naegleria lovaniensis
MNAQTKILNTIMPAAQVKGSDMIIPIGFQCKVQSGTNFDPHSYFSSTIPELFYLDNYGKLKSNTLYNLNCNHIEETKINNENLFVVKNNSKQKIDDANGQGMKVSSNAKWYNDIRNAVLQVFKSSNMMHVCVGLHTTETFSKEVVKKYQKNYLCSFIDMSNYDLLFDKEWERYLKNFLTTVAERVNSDNKHNMK

SEQ ID NO: 4827 - DNA, 20036 bp, Naegleria lovaniensis
  source 1..20036: mol_type = other DNA
taagggtatataaatctttgcatagattccaaaaacaaaaatatatataaatatttgtattattattattaccatatgatacagatttaaaaacatataaaactaaggttttttaccatatatagatatataaaaaagtgtattttcattgaaaattcctgaaacaatttcttcatgcaagtcactctcgtccgaatcaaaatcaaatacacattcgaatcattcaaagaataattcgaacaagatcattctttcggacccactggtgcactggatgatcactatcttggactctctggaccactgtgcgttcggtttttaacatcggacggtcacagagagatgaatgggcctctgtcactaaaaaacctccatcatgtatctcattgctatcctcataaaagatgacggtgtaacctttgagaatccattcgagttgaactttagaaagttaaagatgtggtccattacacaacatgaaactatgatcaatctgtgacaattatcgtcataaccttcaagacgacattgatgagccatggcaaatagcgatcaaaaaagttctacccacgctggcaacaaaataagtaggtttgagaatgttaaaagtcatcaaaacagtcttcagaatcaaaattagttttagtaccgagatctcaagcactttcttttgtgccctatagcacgtattgacaaaaagttagggtgtaaatctgtctttaaagcaaagaatgaatatataatacattacatgcagcataatttttgaggagctctaccaccaaccttctatcgtctttgttcaacgtcagccgtcgcttgtgttacacacatttcatcatggagaggtggaacctcactcataatgccatcgaacaagaactctttattcactgaatgacgttggaatgatcctcaatgaccaacaagaaaaacgagtgagcaagacaattgaatggatgacagtgtagattcagatgatcaactttagaataatagcatcaaacactttaagatgaccatccattccttggcaaggcataaagatcatagctctcacaacttcccaagaatggaccacttgagatttggctccttctttcataatgaggattgaggggcggaagaaatcgcccatcctagctcacagctaatagccctgatcggggtgattgctaaaacactgctgaattcaaacttcagcaacaacagccaccgaacaatcccgaaaaattttaattccagtaattgatagatttattgttgcttgaaacagttgtatggccaaactttattcacaacaaggggctgacttggcaacgttttgcgtgacatgatgtcattaattcaaataccttgttgggagaagcttgacaatatgtatctccaacaaaaatttccatcattcttacatagacatccacgatctatcactaaaaatctaggtcctctcaaagctttgagaagtatatatgatagtacattatctagacttgttaaacgaaattgatggttttgaggaacaaacatgtatgttgaaaagatttgtcaacgttttagacaaatgacatggacgttttttcgtccattattgctgttactagtttcgtttttcccgttattaatttttcgcaattttctgttacttgtttacgaatgttttccgtccctcagccaagtgcgggcatacagcgacaccaacgacaaccacaatcattaacaacacccacattagaattcaatgctattataatatcgtatgtttgtattgtaatgattgagttttcagcaaagaaaatcaaggagtggataaggaattgtaaaggtgttcacttttccatgaacagcaagttatttaaattgatagggtttcaataagtcattcaaaactgatagagtttcaaccttctcatcctcctactaatccatctcttgcacaaagcatcattccattctgggatgagttttcacaacaagtatcggataaactttgaacatgtgccagagagattttcatgattgtattcagtacaacaatacgggatgcactgatggatggttcaacttttctcaattcactgtcattgaatccaagccagggtttgatgttccactcaatgttcaaaactctataacagcaaatgtggctttggaaaactcaaaaaagccacctcagctcaagaaggcaaagaagaatcaaaaggcggcttaacgaagcgtatacatccaaaacttgctcatgttgtggatatatgtatacggttggatcatccgaagtgttttgttgtccatcatgtgactcaatttttgacagagatatcaatggagcaagaaatattcttcttcgattccttactactcatagaattagtttttgagcaccttgtgtgcgttgggtcctttcccctggctttaagatcagcacttgttcgatttgttttgttcaaattgttgatttaaataaaggcgttaaatcaggctggtttgttccacaccaactcgctacctgttccgttgggactatccagagatctggtgtcttaataaattaataaaacgtattgacatgtgctcgaatatctgctgtgttttaaagcttattcaaaataggattaaagcaaaataaaatctgttattttgtcattgcggtgtgaatgacttcagccccttttgcaacaacagtcgactgcagcaatatgttatttgaaagaagattctagagcttggcgataaaattcggtaggtgctgtcacttgtcaatttctcattaaaaaataacaacaacgagaatgaactcccttcatcccaccaacattcaaaaatctcaccaccacaacaccaccacccgaagtcatcaccgttccagttcgactcgagtcggatccaaccacaacaacacagatccaaacaacaattctcattctcctccaccacacactgaaaaattcgttcatcccgaacaatccactcatttatggcaccttttcggattcgcattaggttccttcaccatttcaaccattctttgcatcacgttggcagttgttgttgcattgggagtttcttccagtaaatctcctcgaaattgctatttatggacatcgaatgaggaaattcaaaatcatttattatcggaacagagtccgattcgtgtcttgttggaagatgtgaaaatgaaagaaaatgatagttttgtttttacgagagatatgttttcgagaggtgaattttcaatttctcgttttaataacatgacttcggaagagttgattcgagaacaattcaatttgaatggaaagggaatgaatgtggcaacgttgcaattgagaacttggagtttacctgcaacgatggatttgatttggaatgatggaaagggagtgagtcatgcagtgggtgggttttttgcgctcacagataccattacgattggaagatatgcatcgaattgtatgcccttgacaggtgagagtagtgtgtcgacgaatcagagtatttatggagctaccattaatcaacaagtgaaagattatgtgaagagtttctttattattgatggaaaaggtcaaccaagagcggtcatgcaacaacgtgtggatttcatttcctatgagctgccaattgtcagatatgaaaattcaacaagcgtcattgccatgttgagaaagaattatttaaatccaaatgaacaatggattttgaccattaagaatccattattagagagtgaaatgactgatggttttggttacaatactctcttttatttgattggttatattaattatagagaaaaataagtaactcttattaattctctgttgtgtgtttatatatataaatatatctgacatggtttcactaattgataaaaaataacatgactttaatgttataattttctaatgaatgtaaacaatagactgattcaaaccatgttgaattctctagtctattatgagagttattttagacagcaaaaaagggctgtccaacttccagattgaccaatcttttcaatatttttcactttctcgaattgaagggaaccagagacgtcatgattatcttcatcgcgatcatgtgaggcccagtacaattcaaccttactaaatcctgcttcatcgagagcttctttcaattctcgcactccccatttacgaaattgataactgaacgcttttttaatccaatgatcactgagtctaataggagttcaggaattggtggaaacaacgttcagcagtgtttagcagtaataaaaagaaattataaaacctacttgaagtgaatgtgacatgttaaaatatctgtaattggattgtaactggtttgctcaaattcatacatgatacctccaggcaaatcctttcggacacgttctcgatcgttgactgacaacatttttgctcctccaagcaggtccaatagaaagatggagccataatcagccatcgattctctcacttttttaaagtataaaatcaaatcttttctcttgtggagaagacacacactgtaattgtaggcacaaataatatcggcctttctgagataacactttccagtgtcttcgtcttgagcgagcaacaattcacaatctcgtaattcttcttcccaattgaattcgagaacattcttggtaaatgtgtaaattctatcactcacgttgaattttgaatattttgtttccatgttgtgttttcttccccattgaatagtgtcatgatctaaatcaataccaatggaaatattttcaactcctcgtttggccctaataacgttgagcttgatattcaaagaaagaattacaaatacctaccattcacaacacaatagaccagtaccacaaaaatcttccctgaaaacatgtggtgctttttgttgaaaatacgtcttgaacattttctcaaataaattcacatcatctcttgacgactgcacagattgctggtacaagtggtgaatgtcaacctcaatcttgtttccttcttgtgcattgtgataaatatttccagagtgaacggaactgtcgtgtttgttgacaatctctgtttcttcttgttcctcatccgctgagggattttcttcactaccgtgctcttccatttttccattcttcttcatggatggttccgagctcgtatgagatttcaagtgaggctttgatatgaaatcgctcaagcattggttcaataattgagcaccaaaattcttaataatgttcttttgtaatttcctagactgtgcaagaggaaatataaagggagaagcttcatcggaatcaggatttttcatggcctgaattaataattttaccttctctccgtccttctttttcaatcgattactgatcataaattgagaagcattgaagagaaattgaatctctgaattgatatgttgcttcttcataggcccttcttcttcttcctcggaatcagcaacctgtggttcttcctcttcatcggaaccttctccttcgtcgtgtttcagctcatcaacattttcctcttgatgatcttgaaccaaagattgattcctataccattcgagcctttgtatcaattcttgcaatgaaattttattcggttccgaattttgcattttttttcgaaaaaaggaaacctcaaagttttattagtttttcttcactattgaaacatcaattgaacgttgcatgaaacaagcttcactattgaacgaccgtcatgctttgttccaaggttgtttcattcaaaggaatgtcctttgtctctacagtttcagattttggttcatcctcagtatcatctgttgaaaccttttgatttcttccatttggtattttcttattttcagaactctcataataactagtgctactggacttcatggattcctctttccataaaggattgtacaatagtaatacaaatacaacgaataacacgacaccaaatgcttgtaaaaagtaatcaagtacatgtaaatatcctgcaaaagtcgaagtaataaaggagcaaataatggataaaatttgaagaaaggcacttagaatcattcctagcatgagtgtgacaattttagtgaacggtctttgtgaatttcgagatttttcatctttggcatttgacacttggcgacttgtttttttgacgacatagagcaaacgcgaagaaacacatataaatacaatcaagttcaatacgcaaattaaaaagaagatcacaaagagtacaatttgcaatggaagtgaaacagattttgacaacagtgacattttcactaacaagttcatgatggcattaattaaatttaaaattccaagaatgaagcaaaagcatagattcacagagagaagtgtccatttgagtatgagatgaaattttctggacatggctccagcagaagcagcggtggttaaactgaaagaattcatgtcaaaaatgtcacaaattttccaaatttaaacatttcgccaattcacaaaaaatcagttgttcaatataaatacccaacaacaattaacatatttcacgagtatacttacaacactgattgaacaaagccagtaattaaattaatggtcacaacttctgaaaatgccaatgcattttccacgacaccgctcacccataacaccactcgataatccaacaaattcggtaactctgtccattcaataccattcatatagagagctgttccattgtacaccacacgtacggccaatgcaagaatttcaataatgatcagaacagcaacaaagagaaagagaatgtgttgatttcgtttcattccttgttgtcgagatttcatataaaacgcaataaatatgaaaaacaagacgctcagaacaagaatgaacagaatcgaattgacgagagaaggtatattctcggcggcttctggaattttacctgaagtcaaattcacgttcgtcgctgccatggaagcaattttcacagactcccaggtcgaagtttctttcaaaaccaatgatgatgaagaaactgggatggatgtaatttcatgaagagagtgcatggttggaatattttctttggtattttttgaaaaatgataaccttgttgttgcatgtccagttattttgttggacattataaaccttccattttggtgcgactttttccgaatcggtaagtgcaagaaaaaaacgtgtcagtagattccattcaacacgctccttctactgacaacagcaagctccttccgtattaaagcttacaagatgatgattcgttgttattattcaatcaaaatcattgaaagttctatttgttgtaaacaatttgtggtcccaactatgaggtgcaaccaaaaaaaatgtaagaatctcatcatcacgataagaagacatgatagtggatataatacgtaataattgttcgaatcggaatctccaaggaagatttctgatgtaatccaatcattatttctaaatttttagatacaagatatgaacatagccatggacaaacggatgaataattgctctctgtgatgcgctatcctgaatatccaatgctcagtgttgaacgatactttccaattaagccacagggaacacagtccttaaatttggaaataggcaaaatttggacaagatgatgtcttgaccaagaagcctcatggattcttactgtgtctcaacgctagacacaaaaccgtttcgaaaaatgatcagcacatcaacactcttacaagaatgggattcacaatttctcaatgtaatcacacaagcgtacaaaaccatgttgaaaagcaataataataaccatgatgagagcaaccaccactcgagtagtggttgtatcagcgaatggacactaatgaaccaaatagccgaacaggttgcagaaataacctctagttcctacgcattaattttgaaaaaggtgtatcctggccaacatgatcgagcaggttgtgatactcaaccgccgccttcactggctgcgattggtttagcaggttggcatcgagtgactgccaaggatcaaaatattaccataccccccaagttgatatttcgtacacagggttcacacgcattgttcgtaactgcttttcttgagaatagacatgttgtgtgcaatgaaatgccacctcgagggaacaagccaaccgctcatccagatttggagaatgtgatctgttctccgatatgctacggcacagaacccattggagtgttaattattgcagacagacacggtggatacaatgaagaaatgacacgaccgatgacatgtttatgcaattcactggctcatattattaaggttcttgaattacattgtggttctgaagattctgaatcaagtgaagagagttctgacactcaaagccacacaggaggaagtaataatcaatcatgtcctcatctttcgaacaatacagcacgcgtggatatggaaggaaaatttgaaaaagaaaatgaattgctgaaatctgctgaattgtctctggctctatttaaagcagttcaggatagtatcattgtgcttgataaggatttatgtattacgtcaatgaaccccagtgctaaggacttttttaattatcaacctggacaaaagaatgctcacatttcagaattaattcctgataatattgagcaacaactattttggtcaaatttcacgcaaaaacagggaattattgggttcaaaggaaaagctcttgcaaagagaagaatagcagaaattgccaatgtctcatcagccattcatccacctcaaaccatgacagaagctaatacgacctataattttgaatatgtacttacaccaattgcactctctgtgagcagcttcttttttagaaaggaaccatactttgcaataaccatagctgatgaatcaacgaaagaagaattgaaagacaaaattaagtttcttgcgttcttatctcatgaattaagaaatcccattcaagtaatcatttctggaatacatgccttgattgattcagccaattgtgaggatacatccgttattgcatctctatacagctcggtggagttcataacccatttgcttaacgacatgattgatttatcacaattacaatcaggtcatttgaaactgtgtgaatcttcgttcaatcttagagaaaagttggaacaaattatgaacatgtcgtattttcatcaaaatgacaagttgaaaatatatctttccattgatgacaatgtaccgaacactatttattcagatgccaccaaatttcaacaaataatcagcaatattttgactaactcttgtaaatatacgaaacagggaagtgttcacctgaaatgctcttttaatgagcatgtgagccctccattaattaactttgaaatttctgatacaggtgtgggtattgcaccgtctgaaatttcccttttatttaatttgttcagaagactagataagacacaatcagaaacaattggaagcggcattggtctagctctctccaagttattatgcgacattttaggatatacaattagtgttcaatcacagttaggtgttggtaccaaattcacagtgagtgtgccatacaaacctgaggaaaaattgacatgtacccgattcgcaaacaaaagttcccaaacgaataccattgaacacaaacgagttctcttagtggatgacaatgaaattatacgaaaatcactaaagaatatgttacgacactgtgtttgtgaagaagctgagaacggtgctgaagcggttcacaaatgtgaaactaaccaatatgatttcattgtgatggacgatattatgccagtgatgagaggatgtgacgctatcagggtattgcgatgtgaaaaaggtttgaaaactcccattattgccttgacgggcaactcgttacaaaacgaagtagctgaacttgagagagcaggtgtggacaaagttttacttaaaccaatcacacggtcagaattgatgtcggttttgtgccagttgctgccataactaaggcacttcacagatggtattcgaaatggcattgaactttttgactttccaaatatttgatgcttttacaaccacgagcagagagcagcgaatgcattgttattttccgaaagtgaaaattgttggactctcattggaatccagttactatggaatgttgtgaaacgattggttcttttgacatcgcccctttccatcccaagacgacaaataacggatcaccacaagtaattcactccaaaaaaaacaatgcaaacccaatcttcacacaaccacatgaatccgagcaatccagaagtgcctcctccgaataccatgtactattcacacatggttcaaccacagcaacccatcatgaattaccccaatgcgactcagccttcacacgttgttgtggaaatgatggcggcggtccctgctactctgccaattacaaaatctcaatattttgcgagtcgtatgcaagccttgggagaccaaaagttgaaacttgtgattcaagaagatggtatttggatgtcctttttcaccaccattgtggctgtcttgctgtttcccgtggctatttgtctcgagtgcttgtttagtgaattgtgtgtggttgtgttggcgatcctgatcgtttatttggctattgcatttcctatcatcttgttagcagctccattggttataatatacatcttgtggacagagacagtgatgaccgtgattttggatgacgccaaacgagaaatgtcgatcgaagttcgaaaacgatatttcgctgaatccagaagtaatagcattgtgacctcatgtcaaattccatattcagatattgcacaagtacttttatcaaagaaaaaaagagcatcaaaacaaaaagtcctactcgaaacaaggcaaggtcaacaatatgaattctctctgggaatgaaagaggagattgcaaaggaagaattggactatttaacaaagttcttccaagtaagaggagtggtgttgggtgaatgtttcaaacaaacaccacaaatgttgccttaataaaatggtattgtaatatgaacacccatccacacaattcgattgggtcatgatttcatttctacacatgtcctaaaatggattccgaaccaaatggagcatggtaaggagattcaagattgttaaaaatcaaagtgatactccttgttttaccaccacacaacaatcaattattattttcataccattccaccacacgaccacgtcatcactgcgctcaactctccgttcatgaatcattgaatttccaaggttcccgaacaattcaatgactcaatcgtcatgtatcggaccaaagatgaaaaaaatggcccaagtggaaacaagaaggaatctcgatcgagaggagactccttcttttgattcttcccttgaagactactcgtccatccgaacaataaccaggaaggatggatcatgtcatgaacatgggtctttggattcttcttcttctacctttttgaaattaaattatgaggctcatcatttcgttcctcatgaggatggaaaaagatcatcaacagcatcattacttgtaaatacttgtagttcttgttcattctctccactctataatcatccttgtaccaatcattccgaacgtccagaaaatattgtaatcagtaataatcatcatcattcttacacccatgaaacatccggtaatttcttctcattatcactttggccaaaaacaatgcaaacacaaaaatcattcggaccttttccattcatatatttattgaaaatcatgacgatcagcatgatggtcatgtgttttggatttttaggaacgagtaccatggtcgaggctgcttcctttcgattcatgagtgaattcacaaaaactgcaaatacaacggttttgaatgttttaccaaattcaaccacgactgtacttaacaacgtgacaaccacaaataccattggttttggttactttacgtatacatatgaaacagattcgttgagttggcaaattttgatggacacagagttgccttcattttcaaattcaagttcggtcatttcattgcgattttggagactggttcataccaatgtattattaactcaatatgcaaaaaccttattcgttccaaaagccaacctgactcagacactgattgagaaaaatttgttaaattcaaccactggtgtgaccattgttcctgagaaaatgctgtatcctctcaatggaacgacgaaaggaaaaataacgaatactactctctacctgagtgtgcctgaaatgtttgaaaattcatttgtggtacaattttttgaattggaattgaacgcctctctactgcaagataattcttcagaaaatgtcgttccaatgagtgacaaaattcttgtcaaattttcattattcaaaggaaagaacccaacttatacgtattccgttttggaaaaactcaaaaatgcattacgagtcgtttctgtttcaaccgtggcattcaaaaacttgtgcagttctgcctctcctgtagttgcatttgcatggaactcttggaaattatggtttgtcttgtttgtaattattgccatgcttggaggcctagttctctcatggtggaaaccatattttgtagtatttttagcgcttgttgtgttgaacatttctggagtgattaatgtgagtcagacattggctggtttttcaaacgatggtatgctcacagtgttagtactgttccctattgtgcaacccatttctgagaattcacttgttctcaaaatttccaaggttgtttttggatctcccaaatatggattgtggctatgcatgcttcgtgtgtgcttatttattgcattagtgagtcctttcattaacaatactccaattgtggttactctcattccgattattaaggactgggcgagagtgaacaatattgctccctctaaatttttaattcccatgtgtttcatgacgtctgcagcaggattaatgacattgattggtacctcgaccaacattgtcaccaatggtctctacgttgcctatggtttcacaccatttacattttatgaatttttctatattggaagtattttatcggttgtgacggtgatttatctgtgtacttttggcttgtgggtgttgcccaataagaagggtggtatgttcagacttgccagagaacgtggtgagcagttcttgactaagattgctgtggatgatccaaattcacctctcattggaaaaaataagcatgcaattattcaatatcttggattggaaaagttggaagtggttgaaattattcgaaagaaacagagactaagtacttctgcaaatcccactgtcactgaatcaaccaatgctgatacacccaaagtatcaattgccactgatatggtggcagccaatgaggatcaatccacagaagatccagtagagctcatcgttccagttccagacgatttgaccatcattttaggagatgtcattattttcaaaggtcatcccaatatgattcttaaattgcactccaagactggaatttctgaaagcttacctgatgaaggtgctggcattattcacaccatgttgggaactgctgacatgcaaatggaaaagcaagcagctgtcaatatttcctcgtcacaacagccaaatgtgcaaattgaaaatcttccaacaacaccacttcctgctgatagcagtgacggcaatctcgtcgtggaaattagtgaaagcagtgaaattaattcttccaatgatttcattcatgctcacgattcttccactccacaactcgaagtggctcctcccattccaaaggccacattgaaaagtctattgagtgaacatcatggtctctatgaagctgcccttagaaaatccattcatgaagaatatactcaagatgcgactgcctcctcatctctggatgttggagttgtgaatgaagaacaaccacctaaatcatcatcaacagaaattgctgaaactcaaacaccacagaacgagagtgctgttccttcagtccacaacaattccagtactccacaaatgacaacacctgcaagtgtcgattcctcaagcgaagatcgttcaaagagcaagtctaaaaaacgattgtcacttgcctggtttaagagaaagaaaaaaccagaagtcgaggcagaacaagacaccacagaaaaggaaccagaattttttgagttgattattagtgtgagcaatccttgtattggatttagttatgctgaatttgaaaaacgatacggagtggtcgtacttgctgtgcgttatgttggtttggaaacaaaaactgatgtcaccgatttcaaaacatcaaacgtgagtacaggtgacaccttacttgtcattggaagaggagaattttatgccaaatggcacgaatccaaagatttttatgtcatttctcgatgtaatgtgaatccaaaagaaaacaagcccaacaaatttattgtcaaaattccattcacaaataaggaatttaatttatggtggtgggaacatttaattttcccaatatttattgccatgattgcatgtgccattgcaggatattccatgttacaatgtgccatggtcacattgtgtgtggttattattttaggtcttattcaacctatcaaagcattagagagtgtggaatggccactcattgccctaattggatcttcatttggaattggaactgccatcacacagagtggaatgggagaagcctttgccgaagtggttcgattgatgaatattccaaatttcttgttgcctgccgttgtggtattgatcactcttgtagtcactgctgtcattaccaataacgctgctgttgccattaccttcccattagccatggctgttgccattcgtaatggactgaacccacgatgctttgccatgtgtgtttgtattgctgcaagttctgtatttgccactccaattggatatcaatgcaacatgatggtttacggaacaggaggatattcgtttttggattatgtgaaatctggtttacctctcacagttttatattttgtgtgtattagtgtattcgtgccattgatttggggattggaagtaccaaatttttaacttgcctcaatgcaaaatacatggaatttttaaaacaaaacgcttttattaagcgtttcaagattacaaagtacctaacttccgtagtctcaaaaataacagtgtgaaatccattctgataatgtctcaacctcctttaaatattcattattaattttcttaatagaataaccatgaaaagagctacaacggccattgcagaacatactccaaaaaaccaatataaattcttaacaccttgacctggcaccttcatattcattccccaaattccagcgatcagagtcactggtgctaataacacaactattccagttggtatcgtcattattcagtgtaataaaagtgaaacttaccaaacactgtgattcgattcatgaaaacatctgttgcttgtgaatgttgggcaatgtcgagatgtactcgagaaagataattggagtgagtctgggcaaacgaatcacgtgccatgtcctacgctcgtttggaatccaatgaatggatgtaatctatcattatatcgtgcacattaacacttaccaatcgttcacaacattgtttcaagtgatccaaaatatccctcaaaaaatgttttgcctcaggatccaaaaacggaattggcaatttagaagccaccataaatgccaccatcttttgtttgggaagtaacagttttcttaatattgcaactcttctcttattgaatgctattctccagagcaagtcctccttgtctgataaagtcaaagtagctgtaaactcatccacagtgtcacattcacgaatgacttggtcgacctttggaacatagacatcaacaatggcatccaaataggcataaaaaatccatgaaggtgtcaatacaaagaaagattggctgtgctgttctgatggactggtcgtattaatattcgttgttttgttcgaatcagatttatggtctttctttttttggttaaattcaaattctttttcaattctgttaatgagtaaatctaagccttcgattggctattgtaacgtttcagaaatgatacattcaccaaaattaaatacacaccttatcatggatggttaaaatacatctctcaaaaattaccatattcaaataacacggtaaatattcattcaacactaccctccctgtggtttgtccagtaatgcaaataaataaataattgtcaaaagcttcccacttttcaccactatcattgttgacacagtcttcaaccgtcaagggatgcaaattaaaataatattgtaattccatcatgtcctcagaagaacattgttgacaatccatccaaaaatgttctgtagactcctcttgtttggagaggtaaataatcatttccttaatggtatgaaagattcggcaataaccaagtccaattaaaaagaaatgctttccttgttgtaacaaagattgcgtgtccagtaacatttctcgtagattgtattcatgggattcatgtttttgggaggacaatagtgtcgctccatgaagcacatgaggttcccttaatgtttcatgtctattcacgtcattggtggaacttgcagtggtcgtcactggttccatctctttcatgatcgtgtttttttcacgccttggagctccttcttgtttcaaatgtggataagaatgtggaacctcctgatcactcaaagtaggaaataacaatggtagtgtgtgtggggtgaacggcagggatcgatttttatgtttctcccatcccatatcactcaacgttgatggtcttcgagaggtcattggaacagaaggtttgttggtgtacaggcttgtcatgttcggcagcagcagcatgctggatctcctcggcgggaaactattttgatgatacttgtttggtatgttttcatgaagaagaggacgtcgtcgagagggactggtagtcatgtttccgaaatatgtatttagcatttgattttcatgatgtataacatttggagttgcttggtattccgaaattagtggttgttgttgttgttgttgttcttcttcttccgttgtaacttggagaagggttgaatgaacgggttgcatactgtacacgtttttgaaattaatgttattacaatgatattattatgttttaaaagcattcaccattgttgaacatgtgatcttatgatcgggaatggaaatgttcctgatatggccatagttgtatcatccaataacttgtagcatctcggaagtggtcttttgacttgtattaagggttacctcattccacccatcaatacatttgatagagccgccttggagtttggcattccacaacagacacatttgctgttcctcatcgagcttaaaattgttaaattttttatattgcagtgagtagtattcttgagttgttttccaagttttccttctctgctcttcgttagaaaattatttcaatgtcggatagtatgttgatcaaatttgttgttcgtattaattaggctccattgagttgattggggtttcttcatcatgctgtagggaaatgcggtcagcaacatccatttttctctttccttgggctgatgaaacatctattccttcacgagagttatcaatttccgggttgcttgttggagaaattgtgtgcttttgttgccattttgatattttttaagtttttctcatcaaccattttcagagtctcaaacgaaggaagtaagatcacttggtagtttcgacacagccacaaacactgtttcttgtgtagatcatccacaatatttctaatcttttgttgaattcttcttcctgctctcttgtatcttttgcaatgtctgacttctggttgagaccacttcgattgcgacttgtcatacgtgcaacataatctaccaattcttttggcacctccttagccccatttggttgaataaccattcaaatcaaaggtggtctgaaatgttcttactcctccaacaccactaccactctcatactcttgttcgagttgtttcagacgataatatccttgtttcagtttgaccctctccactcgcgataataattctgtaatttcatcctcatgaacgctcaaacaaaaatcttgaacactattatgccagctgcgcagtatgtctattaattaataaacagttactttataccggacacccaaatagaaagatcactacctagccaatgtaataaccatcccaaaagaatgtggggaacaattcgaaaaagtgggatttataactccatctaatgaacaccacaacgacgtgtttggtattaacagagttaaaggttcagacatgattattccaataggtttccagtgtaaagtgcaatctggaactaactttgacccccattcatattttagctccactattcctgaactattttatctcgataattatggaaaactgaaatctaataccctctacaatttaaattgtaatcatattgaagaaaccaagattaacaatgaaaatcttttcgttgtgaagaataattcaaaacagaaaatagatgatgcgaacggtcaaggcatgaaagttagttcaaatgcaaaatggtacaatgacataagaaatgctgttttacaagtatttaaatcatcaaatatgatgcatgtgtgtgttggacttcacacaactgaaacattctcaaaagaggttgtaaagaaataccagaaaaactatttatgctccttcattgacatgagcaactatgacttactcttcgacaaagaatgggagagatatttaaagaactttttaaccacagtggcagaacgagtgaatagtgataataagcataatatgaaataatatatcgaaacaactctatgccattgctttaaggcgtttctcagaaataaattgatccttatgccttgcaaaggaatggatggtcatcttaaagtgtttgatgctattattctaaagttgatcatctacactttcatccattcaattgtcttgctcactttcttgttggtcattgaggatcattccaacgtcattcagtgaataaagagttcttgttcgatggcattatgagaataaatgtggttctatcatttgtagataggaaacatttgaggtaggtatctgcagattacgagcttgagggcacaaaagaaagtgcttgagatctcgttctcttcacacaatcgggtctgggaaacatttcgaacgcaatttttggacaactcgaccgacaatgacaataccaagaaatgacaaagttgtggacgaagtgaagaacagactcgccctcactttctacgctgaagtacttcagcatcatacacttggtgtcaattatgttctgcacttcatatatttgacactcacggtcttgccaagagaaatcaacgatttggattatttgtgaaatatacagcctgttgacagtgcgtgtaacagctcagaacagctttatgatgacaaaaaaacgaataccaatcaatatttaattgattttataattgatctgtatcttggaatatttcaatgtaacggacaagtttaatatttataattgaacagaatgatgtaaggacagtgctcgaatattcactttcatttggaaattaatcaaacctctcctcccaaaaaaacaacaagaattatttgttgccaacatgggcagaacttttttaatatcgctatttcgccttgctcttcgtcttaaactttgaaaaggggtgtagatgtaaaaccaaagaaacgcaaagaagtaagaaatgatgaagaagagatgagttgtgatcaaatcacttgaacattaataaaccaagcatcaaaggttgtgacaacgttaatgtcaaatatctaaagcataaattaaggttaaacaattaatattcaactacatgtacaaaagattcgaataaggtagtcccgcacagtgtcataatgttcttccttaccacaagagcatgttaagggtaggagtgcg

SEQ ID NO: 4828 - DNA, 4830 bp, Naegleria lovaniensis
  source 1..4830: mol_type = other DNA
ctgctctatttggaatagtcaagaaaattgaaaattttattgttgttattgataacgcaaatgtttattcaaggtttgtattgcagtttttcttaagtgattcatattatgttttcattagcgaaaatactggatcgaataacctttcagagttaataagtttgagtggtgagaagacaggacttttaaccaagtttggacaatgtattgataccataccagaatttcatctatccatatattctggaactaatttttctattgatgagggaaagatcatgcaatcatctctcggtaagactgaagcaaagattgatatagaaaaaatatatgattttggtttgattgtacgagatgatatcatttcatttttagaaaaacatatcaaaataccaaacaacgagaagaaagagattttattctatttacatgaacaaggttacaagtatgtcagaagaggattaatcacattagcattagaaaagcttgctataaccaacaacatgatagatgctcttaaattgtccgtagacgagtttgtgttgcaagcaaaaaagaatatggagccttatcttgatacctataactcaagtttgaatcctcgattggttgtagaagaaacaactcgacaaggaattcaagacgccattgttaaatacgttactcattatcagtttccattcttaggttctaagtttaaggtacacaaggatgacgttgctgatgctttactgtattctggattttctggaccagaaagctcttattgggatccaactacaaattattttatattttctgcaaaggattttattgggtatgaaattggactagaaattctaaagaagatatttgggaccgaagatagatcaaaattgacgaaaaagattgttcaagaaaggatcaacatgttactccacgaatatccaaactgcaacatggatttggaatcaattgttatgcttcgcctgacagagttggacggtacaaagttctctgaaactagttgttggaaatctctaatcaccaaccatccaaacttaaaagatcatatattcaagtgcaaacattgtttagattcaaacggatatgtagagtattgtatttcaaaacgtgttatagatccagagaagaagcaggatgaaaatggagaagagttgttctggacacacgttgccgagaagaagtgggatttattagatggagtttttatttctccatcaaaagaacaccataaggatgtgtttggtattaacatagttaccacttctacaggtgtgatcattccaatgggtttccagttcaaagtacaatctggaactaaatttgaattgaaacccaccatcgatgaactcttttatctcgataattatggaatactgaaatctaataccctctacaatttaaatgactatcatatagaagaaaccgcatgacaggaagaggtgtccaattgatatactcaacaatagccgaataatgacttcaaaccagagtattaagcttagaagaatttgttagaatttaggatatatttgctgtcaaaaataggaccaaatattgatgaaacccaccgttgaagccaaatgaacaattacagcaatttctttcaaaaaccatcactaaaacacagtcctgatgacgcggcttttttaataaccttgtttgttttggaggttttgttgtaataaacggttttaaatttgtcagcactaaaataacataacaaaagccacaatttattacaaactcaacaagtccatttagtcagttcctgacgaaccattcattcattctttgaatcaaaagtgttgttttggaggtggataaggaattgtcaaggcgttcacttttccatgatcagttcggaagaaaagaatgaatcaagatattcaaattgatagagtttcaattgaaagagtcgttcaatactgataaagtttcaactcttgttgaggttttcaaaaaaaaacttaacaaccttaatctcaacgaatgaagagaagtagagaggatgaacccactcatcctcctggagcttcagtacgattccattattattaagaacaagttgaaccattattatttatgtattccacaagttctggatattaggagtaagaacatttcagaccacctttgatttgaatggttattcaaccaaatggggctcaggaggtgccgaaagaattggtagattgtgttgcgcgtatgacaagttgcaaccgaaatggtctcaatcagaagtcagacgttgcaaaagatacaaggacaagagagcaggaagaagaatttaacaaaagattagaaatattgtggatgatctacacaagaaactgtgtttgtggctgtgtcgaaactaccaagtgatcttacttccttcgtttgagactcagaaaatggtaaagaaactccatatgagaattaatagcaagacagcaagaagtattgttgacttggtcacattatagattcaagcaaagattgcttcacaaagctagagagcatctgtggacacacatttatattgtcaacgaagtgtattcatccaaaacttggacatatttatacggttggatcatctgaagtgtttcgttgtccatcatttggctcaatttttgacagagatatcaatggagcaagaaatattcttcttcgatcccttactactcatagaattagtttttgagcaccttgtgtgttgggtcttccccaccttgtgtgcgttgggtcctttccgctggctttcactctttgagtgtttgcttgcaagatcagcacgttgttcgatttgtttgttttgttcaaattgttgatttaaataaaggcgttaaattatcctttttatgagtgaggtttgccatgacgtttaacgcttaatggtgtcatcccatgttgggactgatgcatgatgtttgtagcatctagttgtatttactcttgctgtattacaggttagaaagtaatgtgattcttatttattcaactattagacatgcctatgtacacacggggaagaataaataatcagttttaccaaccatctttctgttgatttacccagttacaagaatgcagtatggagaaataatattaaggccctccttgctttcccagcttctctcgcgattttgaaattcaggcatgacagcactctactccacggaatctgttacactactcaagttgttacggttagcaccatttatataattgtgaaactctatcatttactttggtctttacattgacagcgcagggatatccctaatccacgtcatgatgagattcaaatgattggtaatggtcagaacatattcttcttcggaacacaataagactgctctggataggattacatggaaatattattcagggatttattgtagtgtttacagtcgtattttctttctcttgtgaaactgttgctgttgttggaaactcttgcttggaatcgagaattttttgttcaatcaaatcaagatggagtgaaagctgttcgattgtggatgattcgcatcgttgttccatggcaagataaatgttgtgaacaagaatgtttttcatattgtcgagtagcttatgaagaccgtgaatgaaggcaaggttgtatccattgagagagtcattggatttcacagagtcgttgagtttggcaagctcatcaggcctcattgtaattaagcgaatatcactcttggcaatttctgtggcttcatcaacatcaccctttgcgatcgctttacggaacgattcaaaattgtgcagagggaaatataactcttcagaaagttttaaatgcacgtttcgctccaaatagttctttaccttatttctgatgaccacatcattggtcatacgaggtgaaattcttttacctgttactggagaaacaatctctaccttttttccacaccactttttgaacacttctctttcataagttatattatccactgctactactggatcaaagaaaatacacatggatattggacatgtcaaaactgaaacatcaatgccttcttctgtgtgttcagaaatggaaattaagttgggacttgatgttggagaacatgttgttggcagttcaaagaaatcaccaccacacaatactctcttgtcgctagggttgtgaagaggccaccttgcccaaacagcattttcagggattggacctgaccaattatatttggctctcaggtgagaatttgaatcgagagcatttctgtcaattagttcaaatattcttcccttgtaatttacaatcactgagaacgtgtcttcatgaaacaaaattttcaaacgcatggattcaatagtatgcaatttctcaataccttcttgacttaaacccaaatcggagtacagattcaagaattctcgaatatcttccagctttttagtgtttcccgaagatttagaatgatttaatagctcgctatatttcattcctttgagcgattgatatagcggagtgttctcggcaatgatagtaccgtggacaaaatagatcttaacccaatcaacgagcttttcaattgaatcattctcaatgctgttgatttcacctgtaactcggaaatcaactgtttgtgtattgtacaatcggttgaggagactcttaatcttacatgatttaagttttggctgccatttgaatagattgaatacatgagctgcattcgaatgtttcaggaaaatgaacacttacgttgaagtcaaggaatgccttttctaagcactgtaaaagtttctcaagacttatttctgtacaattaggtgggacgtccattgtggctcctctaagcgtaatcagattgactaaaa

SEQ ID NO: 4829 - protein, 340 aa, Naegleria lovaniensis
MSELNKHIQHALGSSDDVRIGELIFNAAPIIQQDGLEYFISQYKNEKIDIAIIGFPFDEGVKRNGGRVGAKKGPESFRKMIRRAGTIINVEKSTDCSQLKIVDLGDVHLDDESNLEKAHELLEEFVHMALHQLQVGAVFVLGGGNDQSYPNAKALLRHVGQFHSVGVVNLDAHLDVRDLKNGKHHSGSPFRRLLETPGFKGQHFVEYAAQGSQCSQVHANYVLDKGGKIYWLSKDLEGSGAMNVFRQVIEKDFENTESIFVSFDLDSVSMAYVTGVSCPSPLGLSAQQALDICFYAGTQQKVKLFDLSEYNPTIEEYNTGKMVAAMFVHFCMGYSLRNKQ

SEQ ID NO: 4830 - DNA, 5138 bp, Naegleria lovaniensis
  source 1..5138: mol_type = other DNA
atctaccgatttaactccatctgtggatttgtcaaattacaattttggtctcaataggatcgattattattattatttcaaaaaaattaccttgataaaaattatcacccgtgctaatcacaaaatcacatccaaaatttttacaataatattccatttgttcagccacttcagtttgattaaataaacctcgtcttccccaatcacctattttgtgtaaccatcaaatatattgtctcaattttaaataatttttaaaaacccaccaagaacaataaatttcaaatacttttcatcactctttatcgagtattgcaaatgccaatcatttctcttattctccttaaacatcatcaaaattccaatttttaattggtcaaattcctcttcctgcaacacaaaaaacacaatactcaacaaaattcctaaagaaaccaacaataatatcaaacaaataaaacacattgagaaatacggtgaatgatttgcaaataatttccatcgatgtcgttgttcccaaacggacaaaaaatttgaatcttttttcttatcgtcccgtgatgaatcttcttcatgaaacaacgaagaagaagatgtatatggagagtatgaagaggatgagagtcccgagtggaaatgagaaactccatgtaaagaagatggatgatgattcgaagaataaaacgtgaaattcggaacagaatcagaagagccttgttgttgagaaagaggagtgagcctccgataggtgtgctgctgattcggagtaacacttgtactattattcgtgttgttgttgttgttactattgctatggaatggaaacattttttatgatggaatgaaaatggatgagtgtgtcaacatgattcaacgacgaaaagggtcatttcactgacaataattaaattacaattttgattttgtaagacacgtgtcattctgaacaaaagattgagaaattgttttgagaagaatgaaatacatttattgagctctaacaaagtatggtccttcttttgactcaattttaaggaatgccctttgacagttgttcgtgatttcatctcaggacgaggtcaagaggtttttttgaattctcacgtgcattcaagttggctctcaaactgtcaaagggcccatgaccaggcctttgttcttcttcgaccgggtcattgctgcacgtttctttcttttacaattacaagagacgtttttttgttctttgaaatggagtgaatgcaaacttacaatttatttcatatcttgagtgactccaaatgctgctttcaacgaatgaaatttaatcttcatgaagagttccgttgaatgtattacaatgctacaagaacggttgatcaggtccagcggtacagtttcaagattgttctttaccagtgttaagctttctctctacagaaatgtttttttcgagtacctttttatcttagctgtcaaaaccgttcaagccaaaagcacaattacagcaaattctttcaaaaaccaaaaaccatcactaaaacacagtcctgatgacgcggcttgttaataaccttgtttgttttggaggttttgttataataatcggttttaaatttgtcagcactaaaataaaagaacaaaagccacaatttattacaaactcaacaagtcaatataatcatcaacagtcagttcctgacgaaccatttatacattctttgaatcaaaagtgttgttttggaggtggaattgtcaaggtgttcacttttccatgatcagttcggacgaaaagaatgaatcaagttattcaaattgatagagtgtcaattgaatgagtcattcaatactgatagagtttcaactcgcgttgaggttttcaaaaaaaactcaacaacaaccttaatctcaacgaatgaagtagagaggatgaacctactcatcctcctactaatccatctcttgcacatagcatcattccattctgggatgagtactcacaacaagtatcggataaactttgggcatgttcaagagattcctttcatgagtttaatcagtacaacaacaagggatccacagacggatggttcaacttttctcaattcactgtgactgaatccaagccagtgtttgatgttccactcaatgtacaccactctataacagcgaatgtggcttttgataaaaagccacctcagctcgcaaagaagaatcaaaaggcccaaaaatcggacaaattgatgaaaattcgactctaccccaatgaacaagaaaggacaactttgaatcagtagatgggaactgctcgttggatctacaacaagtgtttagaattcaccaacaaatccaaaggtgtcaagaaaaataagaagaatttcagaacgtttgtggtgaacaacgataattatcagacagaaaatcagtgggttgtaaatactccttatgacgtaagagacagaaaagatcatttcattctccacagcaagcactccttataaatgaatattgtccactctttttcttgtggacccatttatacggaacatcaagagcgccgaacctttgcctgtggagcttcagtacgacaagtacaagagagcaggaagaagaattcaacaaaagattagaaatattgtggatgatctacacaagaaactgtgtttgtggctatgtcgaaactaccaagtgatcttacttccttcgtttgagactcagaaaatggtaaagaaactccataggagaattaatagcaagacagcaagaaaaaagttgacttggtcacattatagattcaagcaaagactgcttcacaaagctagagagtatccgtggacacacatttatattgtcaacgaagcgtatacatccaaaacttgcatatgttgtggacatatttatacggttggatcatccgaagtgtttcgttgtccatcatgtggctcaatttttgacagatatcaatggagcaagaaatattcttcttcgattccttactactcatagaattagtttttgaacaccttgtgtgttgggtcttccccaccttgtgtgcgttgggtcctttcccctggctttcactctttgagtgtttgcttgcaagatcagcactttgttcgatttgtttgttttggttcaaattgttgatttaaataaaggcaaagtttgagtttacaaaattaactcacaaaattcacaataaaaatgtctgaattgaataaacacatccaacatgctcttggatcgagtgatgatgttcggattggagaattaattttcaatgctgctccaatcattcaacaagacggattagaatactttatttcccaatacaagaatgaaaagattgatattgccatcattggctttccctttgatgaaggagtgaaacgaaatggaggacgagtgggagccaagaagggtcctgaatcattccgaaagatgatccgacgtgctggaacgattatcaatgtagagaagagtacggattgttcccaattgaaaattgtagatctcggggatgttcatcttgatgatgaaagtaatttagagaaggctcatgaattattggaagaatttgtacatatggctttacatcaattacaagttggtgcagtgtttgttttaggaggaggtaatgatcagagttatcccaatgcaaaggctttactacgtcatgtaggtcaatttcattcggttggagtggtgaatctggatgctcatttggatgttcgggatttaaagaatggaaaacatcattctggatcaccattccgaagacttttagaaacacctggattcaagggccaacattttgtcgagtacgccgctcagggctctcaatgttcacaagttcatgccaattatgtgttggataagggaggaaaaatctattggctttccaaagatttggaaggttcaggagcaatgaatgtttttcgacaagtcattgaaaaggattttgaaaacactgagagtatctttgtgagttttgatttggacagtgtgtcgatggcctatgtcacaggcgtttcatgtccgtctccacttggattgagtgcacaacaggcgttagatatttgcttttatgcaggaactcaacaaaaagttaaattatttgaccttagtgaatataatccaaccattgaggaatataacactgggaaaatggttgcagccatgtttgtacatttctgtatgggatattcattaagaaataagcagtgaaaacgttatttgcaaatgattattaaaataaatattttaaaaggaaattagcaaatatttggagtttgtattaaacaaaaactaaattgaaaaaaaatggcaagtctgaatattggagacacgatccaagtattgtcatcatcaacgacacagttaatttttaaagtccttccgaaattacttttccaaaataatataattattcatgggatacgaaatttagcaaacataaaactatcaagcaaaaaggacgatcgggatgaatatccttcttattttgattcatcaacctcatcactaacagaacgaaaatctaaacacatttcccgagcctattattcatttgttcatcaaattgaagaaactacaaaatcggaacgatttgaaattcatacaacaccctattaccgagctctgttgaggcttaatcacttattgatgaatgatccggtttcttattttatggttctgagcggagtattgatagccttcatcattcccatcatgatttccatatttattttgttttacatgttttttaattggagacaactcggaatatttccaatgttgttgcaattatctttgatcagcatactcgtattatgtagtggagtacccattcagtgtttaatgattctctttaagaaatttccatctccattgcattttctgtatcatgtactgagcttgaggaaacacaaatttggagtgactacttctcttcttactacgacaccattctcttctcaaatcactccactttattattattcgactgagattttaacagtgactcccaacaagggaattcaacttgaaaaaatagaaatggacatttctacttgggatgaaaatgaagaattagatccaaaatctaaaccgcaaaaagtaaccattgttaatttattaatttatttattgactcatca

SEQ ID NO: 4831 - protein, 180 aa, Naegleria lovaniensis
MSASSSSSSLLTNGAADSGMDLYSSSFKPNQQGFFMMQANNASRGIQKQKKMQSIARGAQTSSLVSSTTRSIKRFISNINTHKLIQKNDTVLVNVDDDIAILQSLDPQLHGKMGVIVDVRGDEIELELLPEQSNESEDDSSFDMFSALYCGSSSQPKRVTVPSFCVCLEDRVLRKRLSNA

SEQ ID NO: 4832 - protein, 143 aa, Naegleria lovaniensis
MIEQRDSFHLQNVELTMKLKQQEEKTKRKEEEKRRLVEKNMRLAEEIQRLNEEKERMYSRLDDLVSERNQLCLENQKLKQQARNFSPHSELNNVAPEMNLSSISARSDESASSLESLCRNLHALDIQNEDPSFMSETSDGVKQ

SEQ ID NO: 4833 - DNA, 4807 bp, Naegleria lovaniensis
  source 1..4807: mol_type = other DNA
agaacatttctaattcaaagctaacgttctgactgaattgtccgcactttcatcaacaaaccacgcgctggtgctttcgctcgcagctgagtggacgcacacttttcattgccggtcttttattaagaaacgttgtgatacacaaatgtctcgttgcatccgttttgagctcataccgaatggttccctttgaagatacaatttcacaacagaaagtaaattgattgaatatgagagggaggaagaaggaatagcgcattggagagggttctaataacactttttggtcaggtagtccgtccttcgctcgcgtgtgttatcaattaaagtcaactacaactgaattcaatgcagctcaactggaaacgtcactctcacaactcttgtttaaaattagtaagggatagtcttcaacgaagaacaattcattgggatgaagaactattcggcatctgtgagagaaatgatttggcagcctctgtgtttgggacaatgtctaagatttgtgtttaaggcaacaagcaaagaaagaatgagatttcatgaacaaattttggtgtttaaattctgatttaaaaagggtttatttgatatcaatgaaaaaggtataaacaagtcactcttctgggcacaagattgcaccgagaatcatcattggactgtctttcagttgtggaagagaagtaaagaggtggccgtccttctcatcattatgcatggttcatccaaaagtgtatcttaattgaaaatgcgcaaagtccctgatcatcatcagtttgcattgaaccagctcaatttgagccagaacaatgcaaatctctgatcattcaaattcccatcattcaagcattggacaatctctttctcaatactcgatcttccaaacaaacacaaaagcttgggacggtgactctctttggttgtgaagagctgccgcaatacaatgcagaaaacatgtcaaagctagaatcgtcttcactttcattggattgctctgggagtaattccaattcaatttcatctcctctgacatcgacaataacacccatcttaccatggagttgagggtccaagctttgtaaaattgcaatatcatcatcaacattgaccaacacagtgtcattcttttgaatcaatttatgagtattgatgttggagatgaatctcttgatggatcttgttgtggaggaaacaagacttgaagtttgagcaccacgagcaatggattgcattttcttttgtttctgaatgcctcgtgaagcattgttggcttgcatcatgaaaaagccttgttgattaggcttgaatgatgatgaatagagatccatgccactatcagcagcaccattcgtgagtaaactactactcgaggaagaagcggacatctttacggaatggttgttagtggcttgaattcttttgacgaacatgttgagtgtgcggaaaaggtatggtgaaaatcaaatgtgagtgttgttgttgaattttttttgtgttacgtaaatttgttccagggcgccatgaaccaatctttaaaaagaatttccttgattggtgctacaccttcaaattcacagacctgcaaattcaaaaaaatttttgcagttcgggaaggatcaggaaccgaggcattccgttgtgtgaaattccttgccttggaatgctcgcaaatgtctcggaagaatttgattttgatcttcatcaaatcacaacagatcaaaatgtttgatgaaactttacaatgatacatgcaatatcaatcatacacgtctttacgagtcacgactgttggttgaacaagagccaaaatttatactcgagtttattgttaacatgtgcttggatcaatcaatcatgctgatgtaatatttcctccattccaacaacattgaacagtatgactgaacattgcaatgagaaatattttggttcaggtgatagagggcctaaaatctgttaaaccgttaaaaaaggtgagatgggacctttctccagttcatggggactgctgtctcgttggatctacaacaagtgtttagaaaaattcaaacaacttgatcaacaatgattatcagaaagagaaaatcagtgggtagtaaatactccttatgaatttcgacaagctgccgctatatttgaattgttgactaaaaagaagaagaatggaatcattgacaagtttatgattcgtttcaaggaaagacggaaaagatcacttctccattgcaaacactggaaatcaaagaatggacaattaatcttcataaggaagatcaaaagtgatgaacctttgcctatggaacttcaatacgattctactcttattaagaacaagtggaacgaatattatatgtgtgtctgacctctggttgtgaccatttcgattgtaacttgtcaaacatgtaacataatctatcaattctttgggcatctcctgaaacattgtggatgatttacacaagaaactgtgtttgtggctttgccgaaattaccaagtggtcctgcttcctttggttgagactcagcaaatggtgaagaaactccataggagaattaacagtaagacagcaagaaacatgctgaactgatcaaattacagattcaagcaaagactgctgcacaaagctagagaattttcttggtactttttgtcaaccaagcctttatatccaagacttgctcatttatgttgtggacatatttttaaggttggatcatccaaagtgtttcattgaccatcatgtggcttaattattgacagagatatcaatggagcaagaaatattcttcttcgattccttactactattaatctaaaagtattgtcgtgagagttaataaagagattttgaacacgagcaatgatgttaccttaattttgcgcgacactaaggtaacaacttttatacgattccagtccctgtcgagggaaagacggggatttgacatttattactacacacgaattgtacgtcggttcacgaagcatgttcctctgattactgcttaacgccatcagatgtttcagacataaaggaagggtcttcgttttgaatatctaaagcatgtaaattacgacaaaggctctccaaagacgaagccgattcatctgaacgagcactaatggagcttagattcatttctggtgctacattgttcaattctgaatgaggagagaaatttcttgcttgttgtttcagcttttggttttccaagcaaagttgattgcgttcggacaccaaatcgtccaaccgtgaatacattctctctttttcttcattcagtctctgaatctcctccgctagcctcatattcttctccactagcctccttttctcctcctcttttcttttggttttctcttcctgttgtttgagtttcatggttagctcaacattctggagatggaatgagtctcgttgctctatcatcttttgaacatcaaactcttgcaaaacgaaatatgttttaagagaatttaaacggtttaagttttttggatgaattgctaaaagatgtttatcactttgatattcttctaagttcttgatgctctgtttaccgatcaagacgtacagcttgcttgatgaagcgggaagtttagagcttgtttggttacccaatcaagaatataagggatttatcgaggcttcagatatctttaaaatcattgagatgatcccgcaatcattaatcgattctgatttcgttagtatgagttggtttaaagagaatccgagagcaggatggcttctattttaaagtcgacattgaaaactctcaattgcaaacagaaacctacaaacagttaatttaatgaaccaggatcgaagaattggatatagtacatattgacataactcaagatcaattttctctgtgcaattgtttaccagttgaccttttttcaccttaaggagccaacagatcaactttagcgtaagttgtgatatacagaaaaattgacatgtaactgacaaactcacgtggcacgttcaattaattttatgtgcattataatgatatttacattcaacctttcggtacgtttgcaatacattgccacagatggccaaaatcatttaaatacaatttgtacatgaagaaataaagccatttccaccaggttgatatttacaaagagtgcatcttgttcgtcgcatgagatccaatgttcccacatccatgacattgtgaacaatgaggaattgtaaatcctcaataatttgtctggtctttcgtgtcattatgggatctctagtaatgaggtaggaaaataaatctttgggaagaggataatcggattgaggttttcttgccttctcgagggctttcttcaaagctctgtattgaaagaaactaatgtcttgagaagaggtggtaccagaggaggatgatatggaactacttgcactactactattactactattactactactattaatagaagccttcatattcttcacaattggggccatctctttgaaaagcttctcaacatcaatgagtctcgatactggaacactgggataggtttgttgattttccgagttgatgagacaagtggcaaatccacaaaatggagacgggcgaatattaaagtttcctttacctaacatggaaaggaagggctccaacaatacgcccacactcgctgggaagaaatcatccagtcgtatttgtccttttgtgtcttcctcaatgagtttgagcaattcgagaggatccacattgaaggcttcatcgttttcattgtagtggcttgtagagctgaatatgtcaataatgatgattcatgttacca

SEQ ID NO: 4834 - protein, 187 aa, Naegleria lovaniensis
MPTDTVRGIKKKRNRKNISYIAPSLNITLFQESKQFLTQNNASIKQCCKLKFHSFLSQICSNPQTQEQKLQLSDTVVTHVKTFCSSLPNYSILSDCDKSQVDEILIKICRKHISQIFVNAKKKAKLRRRSGVSKSKNSDNLFDFENDEDVYDINSEEYKLYQEHLRKSSSAKMRRSRPVNPANVVEL

SEQ ID NO: 4835 - protein, 612 aa, Naegleria lovaniensis
MFLQRSGRFNQFSRFSLCNDIIGIASKKHNAACLQAILLPLNFEARKPVLVGMNHDLSNNYLNHQEGSSSIFRNFHYSSRVLNQSSSQGEDQIILTEQEKPIYELFMIVQKSVPLAYRIYDNVNAFTTLLAQIDTLIVMLKDLSKKQDTFLGDPITEIIEAAKELNLSILCRRASSAMVLWRKAETPKEKEQYSEIMERDYAKALESGSESDEVNFAYATYLKIVKSDLRMALHHLTKSIDLNNAVPVKFLKRAELNLELFDEMKDNETAMNIEQERPEPSDMSTSERSNNSQPLDNTLSVKINSEWSDDALEILNNCLMDCERYIEDSIQYAKKNNMTNFILDYYVYYVRGRVFSETFKSEMNQISSNSVFLNNAERDFTLFVEHFEKPENESLIARDILAEGYVRRALCRMHSKNLNGADADVERANALLDSTPDRDMHSDMRNYIEELKLQIQTLQQFQSVYDQATELGAKAAECQSTGDSTQALEYLNEAIAISEDTPIPTLYVQRSMVYYDMFLKRCKEGIPHNDPISTQYIEKVAHDCNRAIEIDPSSKTTEARVVLAEYYKNVTGEKDKAVEQYEIVLKNYLQENDQEMIKTIEQALDDIKKLNK

SEQ ID NO: 4836 - DNA, 4395 bp, Naegleria lovaniensis
  source 1..4395: mol_type = other DNA
aaattctgcacgtcagcagtgagagcttctaagttcatcaataaaccaccaatatcacaaccttcctccataacaaccactcctgtcgttttcttgttgtttttttcgtcatccattttatcctcatgtttgcgtttttttaaaaacgaacacaaatgaccacaatgatttttgatgatatgagaataataatgatcaaactctgtcgtttgttcggaacaacacttgaaaacggggttctgagcttcatctttgtttgaacatcttttcatgtgttttaaaaaattggatgcatgagagtcggagaagcaatctttgcaaaaaggacaagtgaagtaagttgtgccgcatgaaaaacaagtgcatttgatagagggattcaaggttttacactttgccgaattatggatatacaattccaaatcatgtacattgcacttgtggcacattctcaaggaaaccatgtcaaagaatttggattcggccttgttctgaagcatgatatttttttttgtaaagaaaacgcttcctgtgcgcgctcgatctgaactcgcttacaaaaacttctctccaatagtttcaaagttgacccgtttaaatattttcaaaaatcaaaacaaaaaaaaaccaatcataatgccaactgacactgtaaggggtatcaagaagaaacgtaatcgaaaaaacatttcttatatagctccatcattaaatataacactttttcaagaaagcaagcaattcttaactcagaacaacgcaaggtttgtttcttgtcaatatttcttggtgatcatttctttccatgaagcatcaaacaatgttgtaaattgaaatttcattcatttctctcccaagtaagttgtaatgttgttcctataaattttaattcttcagatctgttctaatccccaaacacaagagcaaaagcttcaactttcagacacagtggttactcatgttaaaacattttgttcaagtcttccaaactatagtattctttcagattgtgataaatcccaggtagatgaaatagtaagttgtgtttgttatttgtttgactaaatttcacaacaatcgtttttagttgataaagatatgcaggaaacatataagtcaaatatttgtgaacgcaaaaaagaaggcgaaacttcgtagaagatctggagtctcaaaaagcaaaaattcagacaacctttttgactttgaaaacgacgaagatgtgtatgacatcaattctgaggaatataaattgtatcaagagcatttacgtaaatcatcatcagcgaaaatgagacgctcaagacctgtcaaccctgccaacgttgttgagttgtaaattatgatgccaataaaatttaaaatgcatttgcaataacaattttaaatcaaatattgaaccaaaaaaatttcaaattgaattaaaataaaataagaagatttctatcattatcgtcgatagtaacagccacaggtgttgtggtaggttatttcaacagtatttccgtcgttatttcgttcattaaacctccattattagaatatttaacatgatgcttcttccggctgtattttgtgtcttggtggattcttttcgtcagtaactcccgacagtattttttatctcgagttttaccgtcggctgtacctgcggaaacaagcttgaatcaccttcgaaataacagaccgcaataaggagacactacttatgcacaatatgcattcaataagcttcatttactaccgacgataactatgtaaaatacagacgcgattctctgctcctaggaaaatagaatctccagtaaaggacaattaagggaactttttaaagagcaacagtcaacattatgaatgtgaatatcaacaagacaagggacacaacgaaatttcgaggtgttgatcctcgccaaggagtgtcgtgaagagaatgtccagacgaagccaaggctcgactctgtctatggtatactgccacttgattttgaggttgtttacttaaaatgttgacttggtcacattacagattcaagcaaagattgcttcacaaagctagagagcatccgtggacacacatttatattgtcaacgaagcgtatacatccaaaacttgctcatgttgtggacatatttatacggttgaatcatccgaagtgtttcattgtccattatgtggctcaatttttgacaaagatatcaatggagtaagaaatattcttcttcgattccttactactcaaagaattagtttttgagcaccttgtgtgttgggtcttccccaccttgtgtgcgctgggtcctttcccctggctttcactctttgagtgtttgcttgcaagatcagcactttgttcgatttgtttgttttgttcaaattgttgatttaaataaaggcgtctgttgacttaaaccaattacttgctcaaccaatcaaaaaaaatgtttctacaacgatctggccgattcaatcaattttctcgcttctctctttgcaacgacattatcgggattgcaagcaagaaacacaatgcagcgtgcttgcaagcaattcttttacctttgaattttgaagcgagaaaacctgttctggttggaatgaatcatgatttatcaaataattatttaaatcatcaagaaggttcatcatcaatattcagaaatttccattattcatctcgggtgttgaatcaatcttcatctcaaggcgaagaccaaatcattctcacggaacaagaaaaaccaatctatgaattatttatgattgtccaaaaatcagttccgcttgcctatagaatttatgataacgtcaacgcctttactactctccttgcccaaattgatacattgattgtcatgctgaaagacttgtctaaaaaacaagacacttttcttggagacccaatcactgaaattattgaagcagccaaagaattgaatctgtcaattttgtgccgacgagcaagctctgccatggtattgtggagaaaagcggaaaccccaaaagaaaaggagcaatattctgaaattatggaacgagattatgccaaagctcttgaatctggatctgagagtgatgaagtgaattttgcatatgcaacgtatttgaaaattgtaaaatcagatttgagaatggccttacatcaccttacaaaatctattgatttaaacaatgcagtacctgttaaatttttaaaacgagcggaattgaatttggaattatttgatgaaatgaaagataatgaaactgccatgaatattgaacaggagcgtccagaaccttctgacatgtcaacctctgaaagatccaacaattcgcaaccacttgataacacactctctgtgaaaattaattcagagtggagcgacgacgctctcgaaattctcaataattgtctcatggactgtgaaagatatatcgaagactcgattcaatacgccaagaagaataacatgaccaatttcatactggactattacgtttattacgtgagaggaagagttttttcagagacattcaagtccgaaatgaatcaaatatccagcaattcagtttttctcaacaatgccgagagagattttacactatttgttgaacattttgaaaaaccagaaaatgagtcattaattgcacgagatattcttgcagagggctatgtacgacgtgctttgtgtagaatgcattccaagaatttgaatggagctgatgctgatgttgaaagagcaaatgcacttctggactcaactcctgatcgtgacatgcactcggacatgcgtaattacattgaagagttgaaattacaaatccaaacacttcaacagtttcaatccgtgtatgaccaagcgacagaacttggtgccaaagcagctgaatgtcaatccactggtgactcgacccaagctctcgagtatttgaatgaagccattgccattagtgaggatactccaattccaacactctacgttcaacgatccatggtgtattacgacatgtttttgaagagatgcaaagaaggtattccacacaacgatccaatttcaacacaatatattgagaaagtggcacatgattgcaatagagccatcgaaattgatccctcttctaaaactaccgaagcacgagtggtgttagcagagtactataaaaatgtgacaggagagaaggataaggcagtggagcagtatgaaattgttttaaagaactatttgcaagaaaatgatcaagaaatgatcaaaactattgagcaagcattggatgatattaagaagttgaacaagtaaaattacaacatgaatgaaaattcaagtgaacgagctaacaatgtcacaaaacttcaaagaacaatatattcgaaaaacaacaaaaatgatgaatagagtactctatttggttttgtt

SEQ ID NO: 4837 - DNA, 4596 bp, Naegleria lovaniensis
  source 1..4596: mol_type = other DNA
ttccaaaagtatggaaatttttttgcttgaccacttcttggtcttcaagtacttgatcaccttcacttctgctggagtgaaaggacaatgaatcaaatcaccatgaagtaaccccaaatcctttagctctttgctactcatttctaataatttatcacatttctttcgtttaaggtatggcttgtagtatgatgagaagggaatgtcttctccttcattatttcgacgtaaagtcaaatgaaattgatattcattttcaaattcttcaatgtcatctttaaccacgtatctaagatatctttgaattctaaattcaggaattgtggcatctattcgtgcaatttgaagtacacacaattcactatcgctatctaaaagtatatttgaagaggaagtggaattatcaggtgacgccttctttggacaatatagactctgtgcaggtaaaaagggaataccttggtaacacaagttatctgtttgtctgtaggctgtttcaacattttgaatggaagaatttttaacaagtgtggatgggtacaaaatttgttttctctgttcattcttatcttcggatggataataaaaataatggggtggctttacaaactttcctctgacgtgtttaaatgcactttctaatattgcatttgtgctctgttcgggtatggcatctagctccatactagcattttgagtaggtacttcttcgtcgtcgtctgaagaaggcatgttttcaaaaagtggatctacgtttttcgaaccttccttagagtgttctgaggcagacttagatttggtggtacgcagttttttacgctttccttgcttaactgaagacatatgatcactatctgatgatgatgatgcagacattgatggtgatggtggttgcactggcgacgatgtagaagatgaggatgtatttgttttagcagaatgatttgtattagttttcttcttgatcgtcaccgttggtttcttcgttgtgttatttggattggttattgaagttgttgttgaatgatttgtcatcatcgtggtgtcgtgatcaacctcaacaactgacggcttgtgatgattgaaatccttattttgagaagtggtgcattcgaatacatcatcccatccaccaatgtcaaaggtatccatcggatccgaagcaatttccaaagaaggttttgttacttgtagctgttgttgaatagattgttcaattgcttgttgttcttttctttttgtttccgctttgcaatgaaatgatgaattaattatttggtcaaaaattcaaaatattgttcaatcatcagcaccagtcagtgttgggttgttgatacaatcccgatgatgaatccatgtatcttttttgttctatatattagagattgttacataccttcttgaatcattttaatgacattcttcctttcggtaactagtttactcaatgtttcaatagctggttgcatggcgaaaaatacgttaaccttgtttgcatagtaatcaattttctcaatgatgctttcatcatcatccaccattttcgacgtggaagacttgtcgctattttgcgaagtcaacgaatagttttcactcattttttttggcggtagtttttcacaaggcttgcacaaaccgttgaagccaaaagaacatttacagcaaattctttcaaaaaccatcactatgtaataaaacaccgtcctgatgacgctttattaataaccttgtttgttttggaggttttgttatattaacggttttaaatggctcagcactaaaataaaagaacaaaagccacaatttattacaaactaaagtcattatattcatctacagtcagttcctgacgaaccatttattcattctttgcatcaaaagttttgttttggggtggaaaaggaattgtaaaggcgttcacttttccatgatcagttcggacgaagagaatcaagttattcaaattgatagagttcaacttttccatcagtgcccaaaaatttcaagccgacaaatctatgaaaattcgactctaccccaatgaacaagaaaggacaatattgaatcagtggatgggaactgctcgttggatctacaacaagagtttagaattctcaaacaacttcaaagacgtcaagaaaaagaaaggaatatgaattattgacaagttcataattcaagagaaagaaagacagaaaagatcatttcattctccattgcaaacagtgagcttcagtacgatccaccattattaagaacaagttgaacgaatattatttatgtattccacaagtactggatattagggtagaaccacccctcagcattcggttgaaccattgaatcaggtgtaaagcatttcagccacctttgatttgaatggttattcaaccaaatggggctcaggaggtgccgaaagaattggtagattgtgttgcgcgtatgacaagttacaatcgaagtggtctcaaccatattgcaaaagatacaagtacaagagagcaggaagaattcaacaaaagattagaaatattgtggatgatctacacaagaaactgtgtttgtaagtgatcttacttccttcgtttgagactcagctgaattgctgcttttttcatcaaacttcctttgtatttggtcattttgcacacaagatcttttacttctttttgcttgaaccagatggcttgacaggttcttttggtttgagactttcttgaatttgatgcaaataatcccaatattttgtgttagatggatctaaacgaatggctttttgaatcattttcaatgctgcgtcaggaataccactctcaaacgcaaatgaggataaagtgaaaaagagttcagactcggtcgacatgaatggtttttcagcaaataatacttcttcagctggtccccaatcctctttggcataatacacccagtacatgtttaaacgtgataaaggttggtcgggatccagcttcattgcttgttggaatgcgtttcctgcttcgtccaaattccctagaatatattgcaacttgccatacatgagatagagagaggctgactcattgttaattgtgaacgcattctttgcatattcaattccactttttgcaattgaagtgctgtctgtctttgtgtctgaaacgcacatcatcaagcaaatataacacaatttagcattggcaacaaattgactgttcaaatcattggtctgttttgaaatcactaaacaacaatcaaggcaatacttggccatattgtacttgcgttgattaataaaaagctcagaaagagtaaaccatccatataaattggatggatctttttgattgcattggagaataatttcatgaccttatccatactctcccccttcgcaagaatacactttccaagtagcgaaaataatgtcgcttcaaccttggagacgtctttaaatcgttccattaactttttcacctcactcatacactttgtgtattctccttgatgaatcagttgctctaaagatgccacatgtatggcaatttcagaatcgctgcttgtattttcataaatcgataaataaccccgtaaaagcgagcttgctaccttattaattgatttttctttcttgagaatggacatggtatgtgtgcacgaggcaagcaatcttaatatttttggattgcttggatctagcatcattgctttttgagtcatagataaagcatgtttgagcgttactaaagcattgtgatagtatggagcagaccccattgcatagtacatggatgcaatattaatcaatcgatcaataacagcaagcttatcctcaggaaatatttctgtagctaatcgtgaaatagagctctccataagttgggtagtaagttgtgaaatagcacctgaatttgttgatgaggtcggaatttcgctaacttcaaatttcgatttgctcttctttgtctttttcttttgatccaatgaggatgaaacaaattgatattcgagagtcgtttgagacaacaaatcccataattttggttcgtatggatgtaaataaataactctacagatggcgtttctggccttttcatattctccatagcttgcataaataatgctttctaacttgactgtttctaaattcacgcctacttgtcttgatttcaattgtcttatcacattgagcgcaggttcaggatttttggactccattaccacacacagggaggctaaactatgataggcctcaaagtggtctggaaactctttcatactataaagaaaattaaactggtggtttgaatacttaaatatacataccatttttcgaaaatctcttttgcttttttgtgatctttttgttggtaataaacacggccaagcaaattgtacatttcaataagtcgtttttctagtggctcgccgcttttgatctttttgataatattctcaatggctgagctaatactcttgatagaaaatgaaaaatcagatgcaaagcaactggtgaccgctgatcccattacaatacccatgtcctcggagctgtacttcctacatagctcaaacacagagctagcttcgttgaacctttgaagtttgcatagtatt

SEQ ID NO: 4838 - DNA, 4432 bp, Naegleria lovaniensis
  source 1..4432: mol_type = other DNA
aaatgatgaaccacttaccaaatctctatgtacaattcttctcttgaaatgaagaaaatataaacctttcaaaatttggcatgtaatcaattctaaaatattttctggtactttcacagttgccagagactctaaagaatttccgtccatatattctaataacatgtgaatcttactatctacaaagtaggcattgtagaatctaaggatattaggacattctacacagttatacagagctgttatttctgataaaattaattttggttgaatatcttttgctaattttacaatttttcttgcatattgttttccagtagtagtgtcaacaacaaggtctacaactccgctagctccttctcctagttttttaagagattgtagattttggaaggagactggagccaccttcttttcttgtttctttttcttgaaggtgataatattttcagaacctggatcattcatgaatcgagttttagttcgtgtaggagatgctacgtgaagtaattgaggtttgaagggtgattgagtttgtgtacaaagagaaggtggcatattagtgataccttcctctgtaatacgaacgtcatcgatcatgaaagctcctgatgaagtaatttcataattcacttgtgagtatgttccagaatcgtctgcttgtctagttgctgggggtttcatcgtttgcgaatctgtttctttttgctgtaacagcaaatttgttggtttaaatttctttggtcgttttttcttttcaaccttattctttggtttttccacatcatgaatgattttcttttccagctgttctgtgatttgtttttttcccatgctttctctcattcttgtcgcaaatgaaggctcatcagaggttttcgaattattttgtgtcgtggtgttgttatttgcttgtgcatgattagaaaaagtgtggaaaggattcatatcatggtctgccgtgaaaggattggtatccaatgtcgtttcatgttgatcaagaatggcactaaagaaggtactcgaagaattggaattggacgatgacgtagaagtcggagttggagttgaacacatcatcatgggatcattgaaattatcaaatttctcatcactcatgttggcagaggctggtgttttcatatcggcgaaggaagcaaacaagtctttcgagaatttttcatcaaagaaggtatttgaacttttgagttgatgatgtgggtgtttgttattgctgtcgttggtgttatcacgaggaggactatcaaagaacatgctgatgatgatattggaacgaaatgaagttgtaatatatattatgcgtaatattaataatatctatgatgttcgttggaatgataaaagcggtgatgatgtttgaatcaacaacaacaacaagtccgatgttcctgtacacgtaagaatcagaagagagagttaatcgctattgatcagcatgcgaacacaacaaaggcaagatgataacgtccggatgtgattgagtctcgttcggtggttgtggttgtgaatgaacgaatgtttcgagtcaaaattattgctttgatgacggtgatcaaactgacaataattttttgggtcttaattttggctgtttctggctggtagtgaagttggaaattcctgcaggttgagtggatgctggaagtgtgaaaacaagagcaaccttcaatttctctccaagttctttcaccgaacgcgctgtcgaaaaagattccttaacggagcttaatgagtttactcataactagtgaagaacttcaaagctctgatttattgcttatggattgcagtggtcaacaggaggttcttcgccgttgaagccaaaagaacaaatacagcaaattctttcaaaaaccatcactaaaacacagtcctgatgactcggctttatattgtttgttttggaggttttgttataataaaaggttttaaactgctcagcactaaaataaaagaaaaaaagccacaatttactacaaactcaacaagtcaatatcatcaacagtcagttcctgacgaaccttttattcattctttgaatcaaaagttttcttttgggggtgatttgaatggttattcaaccaaatggggctcaggagatgccgaaagaattggtagattatgttgagcgtatgacaagttacatccaaaacttgttcatgttgtggacatatttatacggttggatcatccgaagtgtttcgttgtccataatgtggctcaatttttgacagagatatcaatggagcaagaaatattcttcttcgattccttactactcatagaattagtttttgagcaacttgtgtgcgttgggtcctttcccctggctttcactcattgagtgtttgcttgcaagatcaacattttgttcgattgttttgttcaaattgttgatttaaataaaggcgatgctggtggctaaattattacaattttccaaaagtagttgttaaggttcataaagaaataaacaattccttagaaaatacgtacttttttactgctgtataaaggcatttgttaactttttggacgtccgttattgtggttcttttcttgttatctttaatgaggatgagcaacatcttgatttaagaaagtgttagaccttttggcgggagtcttacaaaccatctcccgccaacaaacaaacgttacaaatttctcattttataacacatcagcgccaaaaaaaaatgtactcccagacacgatccataaccccagcttccgcctctgcttcgtatcgtccattacaacctgtgcctggaagcggtacatcatcatcaaacaatcaccatcatcatggattgtctgtgggtgttcataagatccaaagaccgctctccgctctcaacacaaacaccaacaacaataataacaacggagctggcatcacagcaacacgaagaaatcctactccaacagtatctcacaacaaattgcaacctacatcagccatgaacaaggttatagttgaggagagatgttataaaaagaatgagagaggagaacgacaagtttcaatacggaagtattatcaagaaagatttctaggtaaaggtggctttgcacaatgctttcttttcagacaagtaggcaataacaagatatatgccgccaaaattattgacaagcaatcactacaaaaggaaaacgtcaaacaaaagctttattctgaaattaagatacataactctctttctcatcgccatatcgtcaaatttgtaaggtactttgaagatgaaacaaatgtatatattcttctcgaactatgtaactgtggttctatgatggagcttatgaaacaaagacaacgattaactgagcaagaggcaagattttttcttcaccaattattgatggcatgtttgtatatgggcgaacatcaagtaatccatcgagatttgaaactgggaaacttgtttcttaccgacaagatggaaatcaagattggagattttggacttgcaacaactgtagaatatgatggagaaagaaagaagacaatttgtggtaccccaaactatattgctcctgaggttcttatgaataagggacacagttatgaagtggatatttggtctattggtgttatactgtatacaatgcttgttggaacgcctccttttgaaacaaaagatgtcaaagaaacatacaaaaagattaagcataacgactatggctttccagagggtcttgacatcagtaacaaggccaaaaatctcgtacggaaaattttgagacgcaacccagacgatagaccaaccgtgaaagaaatccttctggatccattctttgtgggcgtatcagttgatcagtgccctccatctctagtagaatatgctaggtctcatgcccttaaaattggagacttggaagacaacaccattccagcttacagttcaaagaaccctgaacttcaacaacagttgcaaaagttaaggcaacaagagcgtgttcctttcagacaaatagacaacatgctccaccaaagaccttcaactagtgaccacatgaccacaactggggtttcaaagcaacaacatgccttaccccttggttccagctttagacctcctttagccacggttgctgtcaacaatgaaaatgttaatcctcttccttctcaacccacctccaccttttcgaaaccaccttcctcacatcttcacctcaattctcatcatactttgacaaagccaacaaccacaactcatgcttcagaagtaccttcttcaacaacaagatatccaacgagtgatagatccaactctgctcaaccaactcagccagcatttgccatccctgaatatcgtcaacctgtacaaactacaagtcaaacctcccgtttgccaacaccaaagagaagatcgccaagcgaagacgagaataagagcaagcctag

SEQ ID NO: 4839 - protein, 167 aa, Naegleria lovaniensis
MQQQQQPSTLVRSESSISSIGVQSSQSQESLLSHTMSTNTPPHHTFAPFFHHQQHRNNFSNHQNSSSEDSLCITIETEQGDSTIQTSSIRSQPATTTTTTVTSMKTLNQSSTNATTRTLKSQPPQEPGLFASLVDSLLEYFEDWFEDPGEKTDQVAEAKTQMNNGMY

SEQ ID NO: 4840 - protein, 697 aa, Naegleria lovaniensis
MASNTVIGTATLFLSRKGESLQSLYERYKIRCGYHFDLSNIPLIVLNYDNVQSPKEEPIVSECRGLVLELDTWKVVARGMTRFFNQHQQLNNGSRQDLQQQPPQQLDASSESLAPNQANNPVAFNYSNFSLEVKEDGTYIQLFHYRGEWMVATRHNFCEDFCGGGTDTNRMTYRELFVAACGGLELNDVCKDLDTSYTYCIELCSPLNQVIQTYDQKVIYLLTVVNTQTGEELAIDQVDAICLKLRKRKELKSWKRPRRFDHFSSKEQAFEFLKNYFTNEEAGQNSMSIEQRLRVEGFVMRDQNNQRLKLKNPYYLMIHKMKYRGWIQADPKLLVPFVLFFEDYKSSENTGKDHGTGKKQVCDDSATCSSSFHLSNSNTSTSLINIMKNFYECDFEMEQLQKRYNYCATILEKEFKQLVSVWKEISAEKDVMSHNILEQLPQSLKSRTKLFPLCETMLQQFASSENQDTKHLLSIHALEQVMKNNCDLILSQLFSSQQQVASFRSAVLEYDKSHPPHYCIPNKKKFKIPNSGLASKKPYLEKQTNQYKVQCFCGKPMVLKRLKRDFVQYRTCHCGAAFDTMTYKVGTLLWVCSSYPECLLNHMAHQMDEMFSDEKIQYFKGQPLGIPSSELCKTMRLQIHEIMSILMKKNNWKKSYCYALMASWLNVDKSQAHVALFSIETCLFIIQKFLDEYSGIY

SEQ ID NO: 4841 - protein, 286 aa, Naegleria lovaniensis
MQERDITNYHLEEQLSHSPWISLKRFHYHQNGMKKSWDLAITPDSVAALLYHPEKECFLLVKQLRPAVFVRQLIELNQSEHVISSEISSSSTTPSSLSETTISPISATSTSITTTTELIPPKAKLSLELCAGLLDKHGKSPIETMQAEILEECGYHVPLGMIEPITSYYSGAAKSYSIQHLYYVEMRQVLDQKDEEQQQSCIFDPLNGEFCKKVSNGGGLEEEGEMIEVVELPLSQAKELMKDESVVRSPSLLHALSWWFLEKATPEQVEKHYRRSVVSSSLSSMN

SEQ ID NO: 4842 - protein, 1095 aa, Naegleria lovaniensis
MDRRVMIHLRRSSSSLLFSSLFESNSHHQGDDEEPSSYHVQENERRVNLPSPSSDLSFLNIESEDNNFHHIHHQHDMNGDHQKSIHLANNEATTLHRKVHQKSYSFSILNGFGNDYNEVRHDGQLDVKDDTTIQHHHHAAMVTTTPNHLNTIQHSDNTALASNFSHQNWPSEDFSSSPTNSMHSSKQKSSSSAPSTLSTTAPHSSHSLQNHSSTSTCPNSSSSKNSKSSLVTSSSSSQDKFLIWWIAFILLLILLMAISFGLMSAIPEIKRRRIENTPYWDEALKAKEEKRKLSMQHGMWHNITVAVLGAIHARRGGPTPSTTTLSTINHNVQPVPSIASSSGYSSGAQPSASTSLSDSQMESLSLRMRGLVGNALKISSRKQEQGPSPQMSSKSSSSKTAKIMIIEEHDKKKANGHDSNPISMSGPSQQPITSLPSNEYLLKNLDHPFLDSKDMIEKQYFANHILLSHDLNPFYIVNSSALTSWKDFYKTLLLKYATESFSPSLLRPIDEKFEQDFFRRILIREKSVYSRMSSAQLKSQFFGPSLKRRIANSKFVDWRANHLLYDIDRTHESDTSFQYQVTSRRSTFKVHVKFNDVKYRDDFLEYPRVTEKSRERYCENNYCETDYDMANLPPHSDTQNAANHSTTHKLCILCETNIPKTQSSHFYKGLCYKPNLDLAIVSIENGILDYGLHDPSKIFSIFDSHGNLFAQDQIGSTSALEAFKHYNLEYHSQLASIGPIQIPSPSEPDNFFIEIVPRLILMDSYLPLEIPIVLHEEIGVEKIDLLQQYGMISPARQFLFAASGIPTFHMAQRLYFLFSKDISVVPRTPDIALRVASNVMNKAMRQFTTVNSSILELLLDASQRPYLLVVEKDSNQIGDNDDEHTHTISNRQQLLSSMQEFCNSKGLSLVHLKIPTIRSTNNSQVNFTSTTNGSYVILTWTMSSGQQEQQKMTLSFIEIGKLFHQAQGVISLFDFPLSHYLLFMKKSSSSTPQTTPSKQEVSQQNDHAMNLKQVESTSMSTNPTTSHFVLEIGSRETLHNENYCVARALGLKYYTSVIVKYGKRSRSDENDNDSFEIDVGEVVQLLSTELSSSQQ

SEQ ID NO: 4843 - protein, 1990 aa, Naegleria lovaniensis
MFNFASLFGSSMKANCNNPSQPLLFETYDQFLYTRVFPSSGGVTLEGSDTSSSSSSSSTNNNNFGGANIAHDQIASALKVVKTCNVYEKHELDSASSTLPETQRNLLMLKAYYTNPSKEDTKFLHNTLRESLMDFAGSPGHDTAFSSSSYKTKQDFNASKKAHEIYHSDSADLSSSAEDPLALDTKALESILKAADQCLKMSPNCIEAYNALAMYKAKSFEEALAFYRQGQSKFSEYYSKEFISSMKKSNWTYHDLRQYMRAIIGEANTLRKMGRYEEALAAYYRAEKIDPEVHSMMVSYINFQMHIPECLMRLGKWREAYQFMKKKKDLLELSSSKVLLWSFALCDFVVNQRTPNHFAGEDMIKYSESHDRNDLAHMYGPLWAATNNAPLVYEYLLGIRKLSKVRISKTLSFTSDSPSIVSQVQYVTDHLDLWLSVPKAIEWAIKNCNTAYASLSLSNKEESLNRRYFQKSQPYDNFFRCYSKLLFADVRVDICSTLLHQAVFADSVEAVKLLVDLGASIFSKMEPHAFHVACYYDKSREIVKFFCEKTGNPLRKGQVPQSPLQMAANQGNWKPLAEILSYLLKKKKLTQSVLVDCLEEVFGSSCYECVKGLSKCQRCLYHQDKPHSKDVSFEKCTELLLLFGLEVKKSFLQQLAKDYPPKKDLIKLISDRMDKSVSILPRAFNITDPEVLKLLSKDQTPPEQPSTPKDENASKENENKPSKQSEKKPQEQPSEKQKPQEQKSTKQDKTPGQSAESLKNLGNEEFKKGNNIKAIEYYSKALKQSDSTEIKHILHSNMSACYFNMKAYEKSVNSANEAISCNKTFIKGYLRKATALEALKNYNEALIVVKEAIKLDPDNEALVSMFKKLKQKAAEAETHEDEEEEEEDEYDEDYEDEEGDEDEDYEDEEDEYDEDEEDEEGDGDLPSNFEQFVNMLSFMNGGKLPEGELKELMKQMKRSQKQEETESSSQRGMALVDGMLENLGPMLEQRFEPHKKEVYSWLSQLSNQQKLSIFDETWNSSLTQHASVVKNLSNIKDTFKNVVLNDKFAPLMDAILYAKNNKIQLSKFFDPAFIFSATWEHMPMVQPLFEIVGEVSSKVNDNPILCLLTTIQFIASFSAISHKTWEKKVLSGMAKNSKKEMQDYTNSSLTESHIIKGNEKKKRHCPMCPRIDDEKFTFLPLDMSYDNHCKILNSSKQESLETRKNALIYISKCESHVFEIVTDKVFFAQLKKLLEEEKESAFEVLGNVFAAPHVKAELLEQCLSCVNVLEKDSQFMKKVLSLANTKSITPALCRFLANGAFSSDKFGCMMEDFLPPLYENIVSSFKLSEKKTPHINALRATACFASIPNLRRGMHCLGYGSILYQIQVNPLTCNIDSIAAGMATTAKDWLTSGDKERISYKSKFDPSSKLTKEDRTSLFQCSSKFSIEELPPVQESLFASIKKNGFLKSLTGRFVATVCDGYGIFKLCRVDRVQHEFVVTGILFNAYTQVVRDVLSGAFDNASNCENFLKSYFRGTTAPRPYKTKFPDQPYTSLSFIPDSVALDIFGACMAETVKIRKLNDTESSILEDWKKRFNRPNLGSQKSKSLQDVLQNCLLSDLQVSSDNNRDKTYNFKFYREMMCTPFFHNFYFAVGDQMEFGFMPPFETVHTEITNIHDMLPTPKNGVMDWIVCMCQVIDHVPEAKKFLSNIFTYSASYLKVYGAQSIASDIYSKLQQWHQNQLKAIDLPFIRAFIERTYYYNGQEMLPDGMVVALFKQHGLEHAINTILENSRSRMPARLVPRNEVFMELSNMLARWLVRRKSKNKKPPNIQTYFSKVIPKIVAHPEMGQLAGTLIVSMSQMKLVSIISSIWNQITAKSLKKGEPTDYFELDKLRKQHVEQEKEQYLKTVVESGTKKEETQVNNENSKQQQAEKEVSKSIASTTPLPSTLSTVPPQPPQQKPSSNVKVCAACGKPNATKRCGGCHGVVYCSKECQVAHWKTHKVDCKKASSK

SEQ ID NO: 4844 - protein, 158 aa, Naegleria lovaniensis
MTTSGARRPCGVQTKTYHKLKKQYNRNMKAMKKFRIQQERPKEQEGKDQKFQKKFVIKLPQSNHQEARAVYIAKIFVQQHQYFLYVGATGDWNTRKKCHLRSGRKKASAMRECIRRAIFIEFYLVGKYRDFKRAENKLIAIALRTHPNLILNRNFNCY

SEQ ID NO: 4845 - protein, 224 aa, Naegleria lovaniensis
MKDKMKANSQKNIKIYAEKEMRNLKKLNEAGVSCPTPYLVKDHVILMSFIGKQGFPAPALKDVTFTSVDKLKKAYTQVITNMRKMYQKAKLIHSDLSEYNILYLHGEVYIIDVSQAVESHHANAKSFLVNDCRHINQFFAKQGLTTILTDKELFDYVIQNVEGYMTEDELLETTLCVTELRDISMMDQTQDDKYFAQVCLPQSSIDFDDNYHAVAAHSAVDIVE

SEQ ID NO: 4846 - DNA, 20813 bp, Naegleria lovaniensis
  variation 7895..7904: note = n is a, c, g, or t
  source 1..20813: mol_type = other DNA
  variation 20737..20813: note = n is a, c, g, or t
cagaaacatggaccaattctgatcattaccacaaaatgattatgaaacttggtcaattaagtccatccaaacccttaccgttaagacaagcacaaccatcatcgaacaagtccaatgtaccaacgactccaggagaaccttattcacagtcggaagaggatttaattgtgacatccttgcggaagggaatgaatttggaacaaatttaccgagattactttaaacaccgaacttttcagtcgctgaaaaataaggttcgacggttaagaaaaaggcaactctatcacaaacaacaaccatcgaagaagagattgaataagagaaggatggttcccaattccactgtttcgactgattcaaaggagttaagaaaaccgttttggcatgatgatacggttgatcgtttgaacaagatttgtcccgtgtcatgttttgccaagaatggtacgaaaatactgacccaaagttggtttatcctttccgttcgccaacgatgtccatccacagaaccaccacctccgagcaagaaggaattggtagaaaaagtgtggagcaaatcagaaacttggaaaaagacgccatgtaagtgtggaaattccaagtttaaaaggacagtctgctcgttcaacggacgcaagtttgggtcagaaaagaagaagcttgttcaggaattcaaagaagtatctgcgttggaggagtctttaacaatgcttcaagagaacggagtgaattcatccacgactgctgagaatgaagtgaattcatctacgattgctgagaatggagtgacttcatctacgactgctgagaatggagtcaattcatccactactgctgagaatgaagtaagttcatctacgactgctgagaatggagtcaattcctccactactgcggaatcaaaggaaaaagctgatgatgctatcgagaaattgctcaaacaattattcacctccttctcaatctcaaacgaagacaattattttgtgagaacaaagaaagtgagattgaaactcacctcagaacaaaagaaggtctttgaaagatttttcttcaattctaaccatgcttataatgaagcatgtctctttcatttcatgttagagcaaaacaagggaaaaacattccttaccaccacagaagacgattactttaaaattttgaagaatccccaaaccaacctgagattcaaacaaactaggtggctatgggatcaagagttgaaacattgtccagcagatattaaattgaacgctgtgaaagactttgtcaaggctgagaaaattactagatataaaaacaagcaagcagcagaaaaggaatccaaagaggctgctcgaaaggccaaaaacaaatttcttaaagaggttcaaaaaggaaagaaggagatgattactgatgaagaattgaacgaaagatttaatcccaagcattttgctcgacaaccatgtgaattcgaaatgaaaggacgaagcaatcaacatccatatcagtcgttcaaggtgacaaacatttcattatcacaggaaggagtgttgttaaaacctaccttttttaaagggaatgaaagtgcatgtccttccaagaaatctacggatcatcttttgaaattttattatcctacaagagcacgaaagtggttaaaggaagagattggtatgtatatatatgtatttcgattttacttacatgcaggtgatttgaatcccttacatgaatgtgattggaacttttctgaattctaatttttccatgatccgtctacccatcgcctacccaaacatcaagacaacaaaaaattttcacacgagacaacctttgtacgagaaagaggacgatattttgtttgccttccagtccgttatcacaaagctttaactcgacaagaataccaacggtttgataaaagcttttacgagtccaattcgaacagtggaattgaatatgacaagatatttctcaaggactgcccacaaccttctcaagatgaactcagaaaggaatacattgcattggatccaggtgtacgatgcttcatgtatggttatgatagtaatggagacgcattggagtttgccgctcaaggagaaaacaccatactcttttccctctctctaaagcaagatcagctcaggtcggaaattgccaagaacaaatttctaaaatacaattctcggcaggaacgaaaattttataagggtttaagaaaagccttaaaaaagaagattagaaggctggaaagcaaaattagaaataaggtgaatgatatgcataacaaaattattgactatttaactttccactattctgaaattataatacctgaatttaatgtcaaggccatgattgctagaaaacaaaaacaaaggaagcgtcaaggaaaagaagataccacgtgtcaaggacaagaaggttatactaatgaccaaacggagaatatggatgtgcgaacagaacctcttgttgcatcgtcttcaccattcgaaggatgggaatcaagggacaccaccacaagtgaaaccaccaccaacacttccgaatgggttggaagaaaaattactagaaaaactgttcgccaaatgttgcgatttagacactatgattttcgaatgaaactcttgcaaaaggcagaaatgcgtggatgcaaggtacatgttgtcacagaacaatatacatcgaaaacgtgtggaaattgttcagtgatcaaggaagacctttatggaagcaaatggtttcattgcaatcattgtcacttccacatccctcgtgacggtaatggagcaagaaatattttgatcaagaattaccatcatttattacattggtaagttgaagagacaactaaaatgattcatcattcgggccatagatctatataataataactatgtgattatcattctgtcaagatgataattccgtctctcgtgtgagagatgagtatgtgatcggagcactttaaaacaccaaaaaatcattgttatcattgatggagtatggtgtgctctccgagagtaagttgttgttgttgttgttcattatttttaacgcgtgtgactttttaattttgtaaagaaacaattcctatctgaaattccaatacaagatccaattctaaagtattgaataataaacgacgcacttgtttttcaataactccttttcatccgctgttcatgaaatctctccgcagacgcaattttaaaattcaacaattaaaaaaattgaaatcacatcatgcaacaacaacaacaaccatcaactctggtacgatcggaatcatccatctcttcaataggagtgcaatcctctcaatctcaagagagtttactgtcccatacaatgtccacaaatactcctcctcatcatacatttgctcctttttttcatcatcaacagcatcggaataatttcagcaaccatcaaaacagctcttccgaggattcattgtgcattaccattgaaacagaacaaggagatagtactatccagacatcatcaatccgatctcaacctgcaacaacaacaactactactgtaacgagtatgaaaacacttaatcaatcatcaacaaatgctacgactcgaacattaaaatcacaaccacctcaggaaccaggcttgtttgcatcgcttgtggattctttattggaatattttgaggattggtttgaagatcctggagaaaagacagatcaagtggcagaagcgaaaacacaaatgaataatggaatgtactgaaatgttccatctttggccaatttttgctgtaaatatttagtgatatattaagagcatgtatataactctttcccttaaattcattgcaaatgtgaaatgtgtgtcacaactcctcatgacttccatgcaaacaaataataaatatgaaaaacaaacattctccttgaatgtttttaatgatgttgaaacttagtgtgacatacgtttcagtttgttatttacctttgtgtattttcatgcgaatttacctcaataaattccagaatattcatccaaaaatttctgaataatgaacaaacatgtctcaatagaaaacaatgcaacatgagcttgactcttgtcaacatttaaccaagaggccatcaatgcatagcaataactttttttccaattattcttcttcatcaagatggacataatttcatgaatttgcaatctcatcgttttgcacaattcgctgctaggaatacctagtggctgtcctttaaaatattgaatcttttcatcggaaaacatttcatccatttgatgtgccatgtgattcaagagacattctggatacgaagaacacacccataataaagttccaaccttatacgtcatggtatcaaaagcagcaccacagtgacaagttctatattgcacaaaatctcttttgagtcttttcaacaccatgggctttccacaaaagcactgtactttgtattgattggtttgcttttctaggtagggttttttcgaagcgagtccagaattgggtattttaaacttcttcttattgggtatgcaataatgaggagggtgactcttgtcgtactctagcacggcagatcgaaaggatgctacttgttgttgtgacgagaagagttgtgaaagaattagatcacaattatttttcatcacttgttcgagtgcatgaatggataagaggtgtttcgtgtcttgattttcactacttgcaaattgttgtaacatcgtttcacataatggaaataattttgttcgacttttgagagattgtggaagttgttcaagaatattgtgtgacattacatctttttcagcactaatttccttccacacactcactaattgtttaaattccttctccaatatggtggcacaataattgtaacgtttttgtaattgttccatttcaaaatcacattcatagaaatttttcataatgttgatgagacttgtggatgtgtttgaattggagagatgaaaggaggaactgcatgttgcagagtcgtcacacacctgtttcttaccggttccatgatccttgccagtgttctcactcgatttgtaatcctcgaaaaacaaaacaaaaggaaccaataatttggggtcagcttgtatccaccctcgatatttcattttgtgaatcattaaataatatggattttttagcttgagtctctggttgttttgatctctcatgacaaagccctccactctcaatcgttgttctatactcatcgagttctgacctgcctcttcattcgtaaagtaatttttcaaaaattcaaatgcttgttccttacttgaaaaatggtcaaatctccgtgggcgtttccaactttttaattcttttcgttttcttaattttaggcaaatagcatctacttgatcgatggcaagctcctctcctgtttgtgtatttacaacggtcaataaataaatcactttttgatcataggtttgaatgacttgattgagaggggaacaaagttcaatgcaataggtataggaggtgtctaaatctttacaaacgtcattcaattccaatcctccacatgctgcaacaaataattctcgataagtcattctattcgtgtcagtgcctcctccacaaaagtcctcacaaaaattgtggcgtgtggccactgaatttccattttacacatttagaatgttcttgtgtgacatgaaatgatataaataacatgaaaacacatacccatccattctccacgataatgaaacaattgaatatatgtaccatcttctttcacttccaacgaaaaattggaataattaaatgcaacaggattattcgcctgatttggagctagtgattccgaagaagcatcaagttgctgtggaggctgctgctgcaaatcttgacgtgagccattatttaattgttgatgttgattgaaaaatcgagtcattcctctagcaaccactttccatgtatccaattcgagaaccaagcctctacactcactcacaattggttcctctttcggagattgaacattgtcataattgagaactatgagtggaatatttgagagatcgaaatgatatccacatcgtattttgtatcgttcatagagactctgcaatgactctcccttccgagagagaaacaaagttgcagtgccaatgaccgtgttgctagccatatttttttgttttggttgattgctctaattctttacaaaatgaaagatgtcacattggactggcgtcatggatggtggtcaaaattagggatcaatatggttaaatgcaaaattaattcattgaactcaaagatgacgacactacagatctacgataatgcttttccacttgttcaggagttgctttttctaaaaaccaccaactcaatgcatgtaataaactcggcgatctcaccacactctcgtctttcatcaattccttggcctgtgagagaggtaattccacaacttcaatcatttcaccctcttcctctaaccctccaccatttgagacttttttacaaaactcaccattcaacgggtcgaatatgcaagattgctgctgctcctcatccttctgatccaatacttgtctcatttcgacatagtacaaatgttgaatggaataactttttgctgctcccgagtaataactggtaatgggttcaatcattccaagtggcacatgatatccacattcttccaaaatttcagcttgcatggtttctatcggcgactttccatgcttatctaataaaccagcacataattccaaagataattttgcttttggaggtattagttctgttgtggttgttatagatgttgaggttgcagaaattggagaaatggttgtttccgataatgatgatggcgtagtggatgaagaagaaatttcagaggaaatcacatgttccgattgattcaactcaatcaattgccgaacaaacacagctggcctcaattgtttcaccaacaagaaacactccttctcgggatgatacaacaaagcagccacagaatcgggcgtgatggccaaatcccaactctttttcataccattctgatgataatgaaatcgtttcaaagaaatccacggagaatgagataactgttcttcaagatgataattggtaatatctctttcctgcatccaatcaaaaagcagcaaatttaaaaataaaatataaagttcccacgcctatttttgtatttcgtgagtcacgctaaaacaagaatggcagcacgacgcggatgagagggtttgtgtgcaaccattcgcggcccgttctcaagtgatatcttacaaccaagggaaattcgagatagatctatcagaggatttgtgtacaaccattcacgatggtgttgctcactcttccgttggtcccaagcacattccctgcgaattgtttgtcaaattaacgaaaaaataagcgggccacaacaaaattaacgtctcacctcggttgtgttatcatagcaatcatcacaaataattaataataatcatactactttaccacaacaatcacaacaactaccttcggatgaaattcaacaaacaaaatcatcggagcaacaaatcatcatactgtcacaagatgagctgcggaactttaaagaattacgcaacaatatcatattaaaacattgaaggaatctgctgagcgttaaaaaactgaacagttctacgaacaataattcatcagccgaaaccaaggaatccaagaaaaggaagaaatcaatgacatcacatagattaatagagaaatcaaaaaaaagaaaaaatcaaatgtttgagaagaatgcaacaagaagtttgcaaggaatataaattgatatacatttattctgtgacgtgtgtcagattccctcaagctagtgctctcattggtttcctgcggtcaagtgctnnnnnnnnnnatcatcttccatgaatcatcatcttaatggtaccatggacaggagagtaatgattcatttacgtcggagcagttcctcacttctcttttcttccttgtttgaatcaaattctcatcatcaaggtgatgatgaagagccttcttcctatcacgttcaagagaatgagagaagagttaatttgccttctccatcttcggatttatcattcttgaatattgaatcggaagataataattttcatcatattcatcatcagcacgatatgaatggagatcatcaaaaatctattcatttggctaataatgaagcaacaaccctccatcggaaagtacatcaaaaatcgtactccttctcaattttgaatggttttggaaatgattacaatgaggtccgtcatgacggtcaactagatgtcaaagatgacacgacgattcaacatcatcaccatgcagccatggtaacaacaacaccaaaccatttgaacaccattcagcattctgacaatactgcattggcctctaatttttcacaccaaaattggccatcggaagatttttcatccagcccaaccaactcgatgcattcatcaaaacagaaatcatcgtcgtcagccccatcgactctttcaacgactgccccacactcttctcattccctccaaaatcattcgagtacttcaacatgtcccaattcaagttcttctaaaaattcaaaatcctctctcgtgacatcttcttctagctcacaagacaaatttttaatatggtggattgcattcattcttttattgattcttttgatggccatttctttcggattaatgtcagcgatacctgaaattaagagaagacgaattgaaaatacgccctattgggatgaagcattgaaagctaaggaagaaaaacgaaaattgtccatgcaacatggaatgtggcacaatattaccgtagctgttcttggagccattcatgcacgtcgtggaggaccaacgccatcgacgacgacattgtctaccattaaccacaatgtgcaacctgtaccctcgatcgcatcaagctcaggttattcgtcgggcgctcagccatcagcaagcacatcacttagtgacagccaaatggaaagtttgtccctccgaatgagaggtctcgttggaaatgcattgaaaatttcatcgcgaaaacaggagcaaggaccttctcctcaaatgtcatccaagtcttcatcatcgaagactgctaaaattatgatcattgaagaacatgacaagaagaaagcaaatggtcatgactcgaatcctatctcaatgagcggaccctctcaacaacccattactagtttaccatccaatgaatatttattgaaaaatctagatcatccatttcttgactctaaggacatgattgagaagcagtattttgcaaatcatattttattgtcacacgacctcaatccattttatattgtgaattcttctgcattaacaagttggaaagatttttacaaaactctacttttgaaatatgccactgaaagcttctcaccatctctattgcggccgatcgatgaaaaatttgaacaggatttctttagaagaattctaattcgagaaaaatccgtttacagtagaatgtctagcgcacaacttaaatcacaattttttggtccttctctcaagcgaagaattgcaaattccaagtttgtggattggagagccaatcatttgttgtatgatatcgaccgcacccatgagagcgacacttcattccaatatcaagtgacatcgagacgctccacgtttaaagttcatgtgaaatttaatgatgtaaaatatagagatgactttttggaataccctcgtgtgacagaaaagagtcgagaacgctattgtgaaaataattattgtgaaacagattatgacatggcgaatttgcctccacacagtgacactcaaaatgcggccaatcattccacaactcataagttatgcattttatgcgaaacaaacattccaaaaactcaaagttcacacttttacaagggtctctgttacaaaccaaacttggacttggctattgtttccattgaaaatggaattcttgattatggtctgcatgatccatcgaaaatattttcaatttttgacagtcatggaaatttatttgctcaagatcaaattggttctacttctgcactggaagctttcaaacactacaatttggaatatcattcacaattagcaagcattggccccattcaaattccctcaccatcagagcctgataatttctttattgaaattgtaccacgattaatactcatggactcgtatcttcctttggaaataccaatcgttttacatgaagagattggcgttgaaaaaattgatctcttacaacagtatggaatgatttcaccagcgagacaatttcttttcgctgcctctggtattcctacttttcacatggctcagagattatactttttattttcaaaggacatttctgtggtaccacgaacaccagatattgctttaagagtggcttcaaatgtaatgaataaggccatgcgacaatttactacggtgaattccagtattttagagttactgttggacgcatcacagagaccatacctgcttgtcgttgagaaggatagtaatcaaattggagacaatgatgatgaacatacacacaccatttccaatcgtcaacaattgctatctagcatgcaagaattttgcaattccaaaggactatcattggttcatttgaaaattccaacaatcagatcaacaaataattcgcaagtcaattttacctcgaccactaatggcagctatgtcatacttacttggacaatgtcatctggacaacaagaacaacaaaagatgactctttcttttattgaaattggaaaattatttcatcaagcacaaggtgtcatatcattgttcgattttccactttcacactatttattattcatgaaaaaatcaagctctagcactccacaaacaacaccatcaaagcaagaagtttcacaacagaacgatcatgcaatgaatctaaaacaggtcgaatcaacaagcatgtcaacaaatcctacaacttctcattttgttctcgagattggatcaagagaaacactccataatgaaaattattgtgtggcaagagcattgggattgaaatattatacgagcgtaatagtgaaatatggaaagaggagcagaagtgatgaaaatgacaatgattcttttgagattgatgtgggagaggtcgtgcaactcttgtctactgaattatcatcctctcaacaataataataccaagacaaccaattaaaaattgtgtgaattttgaaatcaacacaacttgttaacatgttttattttaaaatgaaagaacatgtgaatttaacacatttacaaagctattcagtgcaactagcattgttgatgaacaaggcaatgaaatgttgcgggctcaaaatggaatgttaactttctaatttttaagttgacttcgaccaacaacacgaacaaaatcaaaaaaaaatgttcaactttgcaagcctttttggttcgagcatgaaagcaaattgcaataatccttctcaaccgctcttgtttgaaacctatgatcaatttttgtatacaagagtatttcctagtagtggaggagttactttggaaggttccgacacttcttcttcatcatcatcatcatcaaccaacaataataattttggtggtgctaacattgctcatgatcagattgcttcagctctcaaagtagttaaaacttgtaatgtttatgaaaagcacgagttggattctgcgtctagtacacttcccgaaacgcaacgtaatttgctcatgttaaaagcgtattacacaaatccttcaaaggaggatacaaagtttttacacaatacactacgagaaagtttgatggattttgctggaagtccaggtcatgatacagctttcagttcttcatcgtacaagaccaaacaagatttcaatgcttccaagaaggcacacgaaatttatcattcggactcggctgatctttcatcaagtgctgaagatccgcttgcattggacactaaagctctagaatccatactaaaagctgccgatcagtgtctaaagatgtctccgaattgcattgaagcatataacgcgttagccatgtacaaggcaaagtctttcgaggaagctcttgctttttatcgccaaggtcaatccaaattttcagaatactatagcaaagaattcatctcatcaatgaaaaaaagcaattggacatatcatgacttgcgacaatacatgcgtgccatcattggagaggcaaacacattgagaaaaatgggacgatatgaagaagctcttgctgcctattacagagcggagaagattgatccagaggttcattccatgatggtatcttatattaactttcaaatgcacattcctgagtggtaagtggttttggttgtgatgaatggattgttttatggtcgaatggttttaacctattgactctattttcgtaatgaaattattattgtgactcgcacaaatcgatttagcttaatgagacttggaaagtggagagaggcctatcaatttatgaagaaaaagaaggatctattggaattgagttcgtcaaaggtgttgttgtggagttttgccttgtgcgattttgttgttaatcagaggactccaaaccactttgcaggagaggacatgattaaatattccgagagtcatgacagaaatgatcttgcacacatgtacggacccctatgggctgctacaaacaatgcaccgttggtctacgagtacttgctcggaattcgaaaactttcaaaggtatgtttttgcgtgtttgttttcgcgagtttcatgaatgtgactgtcacaaaatgtccaaattttggtttcatgggttctcggttctcaatggcaattttctcctgatactcttttttattcacttcaaataggttcgaatttcaaaaacgttaagctttacttctgacagtccttccattgtttctcaagtgcaatatgtgacagatcatttggacctctggttaagcgtaccaaaggcaatagaatgggccatcaaaaattgtaacactgcctatgcatcgttgtctctatcgaacaaggaggaaagccttaatcgacgttacttccaaaaatctcagccatatgataacttcttccgttgttattcaaaactattgtttgctgatgtcagagttgatatttgttccaccttgcttcatcaagctgtttttgctgatagtgtggaagctgtgaaacttttagtagatttaggagctagtattttttcaaaaatggaaccacatgctttccacgttgcatgctactatgacaaatcaagagaaatcgtcaagttcttttgtgaaaaaacaggaaacccactaagaaaaggacaagttcctcaatcacctttacaaatggcggcgaatcaaggaaattggaagccccttgctgaaatacttagctacttgctaaagaaaaagaagttgacacaatccgtccttgtcgactgcctcgaagaggtctttgggtcaagctgctacgaatgtgtcaaaggactttctaagtgtcaacggtgcttgtatcaccaagacaagcctcattcgaaagatgtgtcatttgagaaatgtaccgagttacttttattgtttggtttggaagtgaaaaaatcattcttacaacagcttgccaaagactatccaccaaagaaggatttgatcaaactcatttcagatcgaatggacaaatcggtttcaatcctacctcgtgccttcaatatcacagatccagaagtattgaaattactttcgaaagaccaaacgccaccagaacaaccaagtacaccaaaagatgaaaatgcttcgaaggaaaatgagaacaaaccatccaagcagtcagaaaagaaaccccaagaacaaccgtccgaaaagcagaaacctcaagaacaaaaatcaaccaaacaagataagactccaggacagtcagcagaatctttgaaaaatcttggaaacgaagaatttaagaagggtaacaatatcaaagccatcgagtactattcaaaagcattgaaacagtcagacagcactgaaatcaaacacattcttcactccaacatgtctgcatgttatttcaatatgaaagcctatgaaaagtcggtcaacagcgccaatgaagccatttcatgcaacaaaactttcattaagggatacttgagaaaggccacggctttggaggcattgaaaaattacaacgaagctttaatcgttgttaaagaagcaatcaaactcgatcctgataatgaagctcttgtaagcatgtttaagaaattgaaacaaaaggcagcagaagctgaaactcatgaagatgaagaggaagaagaagaggacgaatatgacgaagactatgaggatgaagagggtgacgaagatgaagactatgaggatgaagaggatgaatatgacgaagatgaagaggatgaagaaggagacggtgatttaccttccaactttgaacagtttgtcaatatgctaagtttcatgaacggtggcaagttacctgaaggtgagctcaaggaactgatgaaacaaatgaagagaagtcaaaaacaagaggagactgaatcttcttcccaaaggggtatggctttggtggatggcatgttagaaaatctcggtccaatgctcgaacaaagatttgaacctcacaaaaaagaagtgtatagttggctttctcaattatcgaaccagcaaaagctttcaatctttgatgagacttggaattcctcccttactcaacatgcatcagttgtgaagaatctttcaaatatcaaagatacattcaagaacgtggttttgaatgacaaatttgcacctctcatggatgcaattctgtatgccaagaacaacaagattcaactatccaaattcttcgatcctgctttcatattcagtgcgacctgggaacacatgcccatggttcaaccattatttgagattgttggagaggtatcaagtaaggtgaatgacaatcctattttatgtttgctgacaaccattcaatttatcgcatcgttttcagcaatatctcacaaaacatgggaaaagaaagtattgagtggaatggctaaaaacagcaagaaagaaatgcaagattacacgaatagctcgttaactgagtcgcacatcatcaagggcaatgagaaaaagaaggtaagttatcaacaatcatacatactccagatatacatgtcaaatttatcacaaattttttcacttttttgaactatttctacagagacactgtcccatgtgcccacgtatcgatgatgaaaaatttacattcctaccattggacatgtcttatgacaatcattgtaagattttgaatagttccaagcaagaatctcttgaaacaagaaagaatgcactaatttacatttccaagtgtgaatctcacgtatttgagatagtgacagacaaggtattctttgctcaattgaaaaaactattggaagaggagaaagagagtgcttttgaagttttaggaaatgtgtttgctgctcctcatgtgaaagccgaattgttagagcaatgtctttcatgcgtaaacgtactagaaaaggattctcaatttatgaaaaaagtgttatcattggcaaatactaagtccattactccagcattgtgccgattcttggcaaatggagccttctcaagtgacaaatttggctgcatgatggaagactttttgcctcctctctatgaaaatattgtatcgtccttcaagttatcagagaaaaagactcctcatattaacgcattgcgagcaacagcatgttttgcgagtattccaaatttaagaagaggcatgcattgtttgggatatggatctattttgtatcagatccaagtcaatccactaacgtgtaatattgacagcattgctgctggaatggcaactactgccaaagattggctcacttctggtgacaaggaaagaatttcctacaagtcaaaattcgatcctagctccaaactaacgaaagaagatcgcacctctcttttccaatgttcttcaaagttttcgatcgaagagttaccacctgttcaggagtctctctttgcctcaatcaagaaaaacggctttctcaagtccttaactggaagatttgtagcaactgtttgcgatggctatggaatcttcaaattgtgtcgagtagatcgagttcaacatgaatttgtggtcactggaattctattcaatgcctacacacaagtggtgcgtgatgttttgagtggagcattcgacaatgcaagcaattgcgaaaatttcctcaaaagttatttcagaggtaccaccgctccccgtccttacaagactaaattcccagatcaaccttatacttcattgtcgttcattcctgactctgtggcacttgatatttttggagcttgcatggcagagactgtgaaaatcagaaagctgaacgatacagaatcttcaattttagaagattggaaaaaacgattcaatcgaccaaaccttggatctcaaaagagcaagagcctacaagatgtcttgcaaaattgtcttctttcagacttgcaagtctcgagtgacaacaaccgtgacaagacatacaatttcaaattttacagagaaatgatgtgtactcccttcttccacaatttttactttgctgtaggagatcaaatggaatttggatttatgccgcccttcgagacggttcatactgaaattacgaatattcatgacatgcttccaacaccaaagaatggtgtcatggattggattgtttgcatgtgtcaagtcattgatcatgttcctgaagcgaagaaattcctctccaacattttcacatactcggccagttacttgaaagtttatggagctcaatcgatcgcctctgacatttactcgaaacttcaacaatggcatcaaaaccaattgaaagcaatcgatttaccatttattagagctttcattgaaagaacctattattacaatggtcaagaaatgttgcccgatggaatggttgtggctctctttaagcaacatggtttggaacatgccatcaataccattttagaaaatagtcgaagtagaatgccggctcgtctcgttccaagaaatgaagtatttatggaattgtcaaacatgcttgctagatggctcgttcgtagaaaatccaaaaacaaaaaaccaccaaatattcaaacctatttttccaaagtgattcctaaaattgtggcacatccagaaatgggacagctggctggtacactaattgtcagcatgtcacaaatgaaattagtctcaattatttcgagcatttggaatcaaattactgcaaaaagtttaaaaaagggagagcctaccgattattttgaattggataaacttcgaaaacaacatgttgagcaagagaaggaacaatatttaaagaccgtcgtagaaagtggcaccaagaaggaagaaactcaagtcaacaatgagaattcgaaacagcagcaagcagaaaaggaggtatcaaaaagtattgcctctactactccccttccaagtacactttctaccgttccacctcaaccaccacaacagaaaccttcatccaatgtgaaagtgtgtgcagcgtgtggaaaacctaatgccaccaagagatgtggaggatgtcatggtgttgtatattgctcaaaggaatgtcaagttgctcattggaagactcataaggttgattgtaagaaagcaagctcaaaataatgatatacctaaaaagtttattatattaatgataaaattgttcattccaactgttgtgacatcatctgactatcagtcttttggttttttccaagtaggatcatcggcggaagcatctaaattagtaaatactggatggaaagatccaatcaattgtgaaccatgttgctctgtgatccaattaattctacgagtaatatcatgatttggctctcgcccagaatcaagaatcttctcaacatcatttaaagcagccataaatcttgttgccttttttttaaatatcaaacaatgaaatgagtgacaaatgtggatcatcaagaagaggattgtttcgatcaaaagaaaacacctttctcaacaccatctcagtatctcgcatttctctgtcaagtgggtcaagttctacgtctgaaggataaaagcgaccgttgaagccaaaagaactacaaacaagtcaatataatcatcaacagtcagttcctgacgaacctttacaattccgtatccacccaaaagaaaacttttgattcaaagaatgaatacatggtagattatgttgcgcgtatgacaagttacaatcgaaatagtatcaaccagaagtcagacattgtgtttgtggctgtgaaactaccgagtgatcttacttcaattagaattaatagcaagacagcaagaaacatgttgacttggtcacattacagattcaagcaaagattgcttcacaaagtttgagagtatcagtggtcacacatttatattgttaacgaagcgtatacatctaaaacttgcacatgttgtggacctttttacggttggatcatccgaagtgtttcattgtccatcatgtggctcaattattgacatagatatcaatggagcaattcttcttcgattccttactaaaaaaacaactcaaagaattagtttttgagcaccttgtgtgcgttgggtcctttcccctggctttcactcatttgagtgtttgcttgcaagatcggcactttgttagatttgtttgtttggttcaaattgttgatttaaataaaggagtcagggttatatggtaggaaaactattgcttacaacgttgagctttggaaatccttacacccaaagatgacaccaccagcagacgtagagacaaagttgagtcttcctgctgtgagattgttgtgcgttcaatacaaaggaaaatcagtctctctatttcaaaaagtccggaaaagcctaaaaggactttaacacgtgataagaaatgaattgtcattcacgaggcttgtaacacattttcaccatcaaaaaaagatgacaaccagcggtgctcgcagaccctgtggcgttcaaaccaaaacttatcataaattgaagaaacaatataatagaaacatgaaagcaatgaagaaatttcgtatacaacaagaacgacctaaagaacaagaaggaaaggaccagaaatttcagaagaaatttgtaatcaaacttcctcaaagtaatcatcaagaagcgagagctgtttacattgccaaaatttttgttcaacaacatcaatactttctgtacgttggtgctactggtgattggaacacgagaaaaaagtgtcatttacgatctggtagaaaaaaagcatcagcaatgcgtgaatgtatcagaagagctatattcatagagttctatctagttggcaaatatagagatttcaagagggctgagaataagctgatagcgattgctttacgcacacaccccaatttaattttgaacagaaattttaattgttactaaagatctttgtctcgactttatcgggcattaagtgttagtttgtctccaacaattttccaaacttccaaattgatcatcttgtctacaacaagtcacaagaaggcatcatgccagtcgcactctcattgtggtttcagcattctaagaaaaagtgatcataacaaagagggaccctatttcgctgaagggttttaaataaggttcaaaagaatgtttatttgatagtttagaaatccatgcaaagagagaaactcttgccgttcactcatgttcatggatgaaaaaacaatcaaagatgtccttcctgaaagtggcctctataaaggtttttcacaggtcaatgtcaagaattcatggaccaaactttgattgtcaaatttcaagagagacaagaggtattgtcattttcaaagagagctttctgaatatgttaagctccgtacacccatcacaagtgacaatgtccactggtcctctagtgttgatcaacaatctttgaagtgtctactcaacaatgtcaacagcagaatgagcagccacagcatgataattgtcatcaaaatcaatggaggattgaggcaaacagacttgcgcaaaatacttgtcatcttgtgtttggtccatcatggaaatatctcttaattcagtaacacaaagagtagtttctagtaattcatcctcagtcatgtaaccctcaacgttttgaatgacataatcaaagagttccttatcggtcaagattgttgtcaacccttgcttggcaaagaattgattaatgtgtctgcaatcattcacgaggaaagacttggcattggcatgatgactttcaacagcttgtgaaacatcaatgatgtacacttcaccatgaagatacaaaatgttgtactcgctcaaatcgctgtgaatgagtttagccttttgatacatttttctcatgttggtaatgacttgagtgtacgcctttttcaacttgtccacacttgtaaaagtcacatccttcaaagcaggagctggaaatccttgctttccaataaagctcatcaaaatgacatgatctttcacgagatacggtgttgggcaagaaacgccagcctcattgagctttttcaaatttctcatttccttctcggcataaattttgatgttcttttgactgttggccttcatcttgtctttcatacgtttgaannnnnnnnnnnnnnnnnnnnnnnnnnnnnnnnnnnnnnnnnnnnnnnnnnnnnnnnnnnnnnnnnnnnnnnnnnnnn

SEQ ID NO: 4847 - protein, 110 aa, Naegleria lovaniensis
MLLDTFDQTNIEDIACGGYNSMILTKNKEVYVGGVGRNALNPNNSGEYSKLEWAQILKQVYTGCTFSNSNVSMHMGNTFYALHISKNTSVLRFFNFRNIWKVADVVFQFE

SEQ ID NO: 4848 - protein, 429 aa, Naegleria lovaniensis
MEIDNLAMSNCKIDHTYSFNLTITNSVLFSTMIRLSNDKQNKFIPATMQYYLNIEGTNFEQVSLYYGNCVLGTVSRSRFVGDYSNLFIIQIKVDDEEEDSESGEFEREATLLSSLRHPNILTFYGICAPNPNQKFMVVEYMKGGSLEKLISNCRNGKDSLDFQSKINILLGVARGMVYLHSLKPRMIVHRDLKPGNILLDENGAVRVCDFGLSRVVGTNTVQQRTMTTNIGTLLYCAPENFSSDSSSYETMSNYSQSTGSLLSSFNQRTSCSISNNDFFGSSSPSSYLSKEDRFKNASKIDVYSFAVIMYSLFFEESPFSNAKKLQHFSENANTEEANTHTLNILSFVLRGSRPKIPFDSPEQMKEWVSEYVCNKEKSADVMSDSLMNAISKYMDLMKQCWHQLPRERPSFDTIVVELYEIQSMLSVKQ

SEQ ID NO: 4849 - DNA, 5258 bp, Naegleria lovaniensis
  variation 3271..3280: note = n is a, c, g, or t
  source 1..5258: mol_type = other DNA
gctggtcaatcctgtacatgttgaaacagaaattagaaaattatttacaaaagtcaatagtggtggaaagaaaggagtactcgcagtacatgcaggtgatggtctagagatggtactggataaagttaaaaatactcttgagcaagttgaggttctaaaatcaagggctgtgtcagagctcgatgagaaaagagaacctagagccacccattgtataaacacagcagttagctttctgtacgcagtcactagaggagtggtgagtggattgctccaactactagattccaacattgctcaattgcttgacggtactcgcgaaagttggggaattgatattgcagatttgctcgaaaaaacatggaacgaagtttttaaggtgatttttgtagagtcagatcaatcggcttacactcctctagggtcactacttgacttgaacctaattcaaaaatgtctcgaagaacttcaggctctcggaaaatcactgtcatattttaaatttgagcatcttgccagagtgttcaataccatgttcaatttcatgaaaaagaacaatagtattgaatggtatttggcattttgcttacaaattagatattacaaagaatattgctcaaagatgatggagcttgaaaagtatgaagagtgcttcgataacattgtcaatagaattttgacaggaaacagctacgctttgagaacaggagattacagggacgaagacaagacgtatctagtcgaatatgcagtcatatgtatgaccagagtttatgacagatgtgtaaagactatcaagcaagagtacgctgaaaaccatatcgaagaaacaatgccagtcaatttagtgaacactcaatatgctgacatgatggacagatttatgggcaattgtgtgaacattcaaaagattgtgctctatcctcgcgagttattaccacttctcaagtttttgcttaaaatctttcctagtgacgaggcattcactatcaatggaggtctaggcgccacaaatcaagatattagacatttgacatttattgctgacttattgtttataatgggaagatttattgttgagattgatgaatataacggaaaaatcgacactgttcaatctgttgcaagaaaaatcgttctggagagcaccaattcattactggagaaattgctaaaaatcaaacatgaagggtgtgacacaaatctcaaagatattgttgaacataacgatctcttcaaaagaagcattgctcaaatatgcgaacatgcagtatggattccaattcatcaagaagaaaaagattacacttggaagcagcttaatgattatcacgaaactcttcaaatcaaacaagatgagtcttccacaaggctcagagaagcgctcttggaaaagctctactacttgcttcctggagtctctatgtacctaagatcaatgattgaaaatttgaattttgcccttaattacaagattgaaaatcgtaacaatatgagttatgaacaatttttcaatgttatgaaaaagcttggaacccattactttaaaagtcagcgtgatgctcagtgggaagaattactagctaaagttaatttcatccattcgagaaaagtcaaactgaaaaagatgctcaagcggtggcatgaagaggaaattaaaaacaaaaaagaaactggaacaaactggtatgacaaacttctcgatgatcagccacctccaatgtatcaagagccattgatggagagagacatttctcgcaacaacacagccaacaatactggagacgcacctatcaaagaccctaatgatattggcattgcatcttcaactaaagggacaaatcagcaagccttaaagaagagaaaagttgcaccttcgaacgcacctactgtagcgacttctgtacctcaatcttcatccatgaacaatgaaaacgatgacgaggccaccgacgaagacgaatgagcagtgaattgaaaactgctgtcacacaaggctcatttatacggttggatcatccgaagtgtttcgttgtccatcatgtgtgtggctcaatttttgacagagatatcaatggagcaagaaatattcttcttcgattccttactactcatagaattagtttttgagcgccttgtgtgttgtcttccccaccttgtgtgcgttgggtcctttcccctggctttcactctttgagtgtttgcttgcaagatcagcactttgttcgatttgtttgttttgttcaaattgttgatttaaataaaggcgctgaccaatttacccttttttcgaataaatgtccattttccttgaatagcgagacctcaggctctagaaagcttgttgatttgaccattcgcgaatgattgaatccaagagttgtgaaaggttaatttactaatggttaggcggtaacagttttcataaagccgtgtcgactattcaaactgaaaaacaacatctgccactttccaaatatttctaaaattgaaaaatctcaaaacagatgtgtttttggaaatgtgcaaggcgtaaaaggtgtttcccatatgcatggaaacgttggaattgctaaaagtacatcctgtgtaaacttgttttaaaatctgagcccattctaacttggaatattcaccagagttgtttgggttgagagcatttctacccacaccacccacgtacacctctttgttttctattgatcaagccatgcacgaaaaaattaaggaaatactttagccataacttggattcaaaaacttacttgtcaaaatcatagaattgtagcctccacaagcaatatcttcaatatttgtttgatcaaaagtatccaagagcatgggagtactgtttacacctgcatttgttgaagcaattctaccaaattgatagaaattaaaatatccaaaaatgtaaacatttgatgacttgcataaaaccgcaacaaaaaacaatccagtcctcacatcttttggatttaagagtcgacatgtaaaagagaaaactaacctgtcacaaattcggtttcaagttttggaacaagagtccaataatgagttggagtgtttgtgtcattgggcaaaccagaagcaccatacgatcggtcgccacaagtatataactttccttcattcgtcaaaataaaactcgtattataggtatacgagtttggctttcactctttgagtgtttgcttgcaggatcagcactttgttcgatttgtttgttttgttcaaattgtagatttaaataaaggcgacgaagacgagnnnnnnnnnntatcacctttgtaaatgtagtttttgaattcattccaaaccctcaaattacatgtaaaccgaagagctttcttaatagcccagtcatctattacaaaattcggtttacatcatctacgagcaatagggtgtcagtggtatgcaatagcttagacctaacttcaatatttgcagattctcagaatattgtttcaatggaaattgataatttggccatgtctaattgtaaaattgatcatacgtacagctttaatttaacaatcacaaacagtgtactgttctcaacaatgatccgattaagcaatgacaaacagaacaaattcattcctgcaaccatgcaatattatttaaacatagaaggaacgaattttgaacaaggtaagattcgaaccaagtatattcagaagtttgacagtgatattcaataacttgacatgttggggtcaatttatttcatttaacgttacgatagtatctttgtattatggtaattgcgtattgggcactgtttcaagaagcagatttgtaggcgattattcgaatttatttatcattcagagtaagtgctttttgaatgcaaagagtcacctaatggttgtaaaaacagttaaagttgatgacgaagaagaggattctgaaagtggtgaatttgaaagggaggcaacgttattgagcagtcttcgccatcccaacattctcacattttatggaatttgtgctcccaacccaaaccaaaaattcatggttgtggaatacatgaaaggaggatctctggaaaaattaatctcaaattgtagaaatggaaaagacagcctcgattttcaatccaaaattaacattcttcttggtgttgctagaggaatggtttatcttcattctctcaagccaagaatgattgttcatagagatctgaagccaggtaatattctgctagatgaaaatggagcagtacgtgtttgtgactttggattgagtcgagtggttggaacgaacacggttcaacaacgaaccatgaccacaaatattggaacgttattgtattgtgctccagaaaacttctcttctgactcatcaagctatgagaccatgtcaaattattcccaatccactgggtcacttctttcgagcttcaatcaacgtacttcttgttcgatatccaataatgacttttttggctcttcaagcccttctagctatttatccaaggaggatcgattcaagaacgcaagcaaaattgatgtctatagctttgcagttatcatgtattctctgttttttgaggaaagtccattttccaatgccaagaaactgcagcacttttcagagaatgcgaatacagaggaggcaaatacccatactcttaatattctatcctttgttttgagaggaagccggccaaaaattccattcgactctcctgaacaaatgaaagaatgggtttcagaatatgtttgtaataaggaaaaaagcgctgatgtgatgagtgactccttaatgaatgcaataagcaaatatatggatctcatgaagcaatgttggcatcagttgccacgtgaaagaccatcttttgatactatcgttgtggaactctatgaaattcaaagcatgctatcggtgaagcagtaaaatgtggtttttctttaaaagatatagggttgtgaaggtttgaataaatgcaaaatctaaacttggaacgctttataagcttattcttttcgttttaagacattaaaaagcatcgtttcttcagaaatgcctgaaatccttgaatgagaattcctgccaactgttttgcaacagggaagaaatgtctaataataattagaaaaaatgcttccacaagaacaacaatcctctgcaaacacgtcatcaaattctcaaagttatacctatgaacaatttgaaaaccaacaacgatcgatcgaacaagaaattaaacaatttccactggtagatcccgttgcaactccgctaacact

SEQ ID NO: 4850 - protein, 201 aa, Naegleria lovaniensis
MRTTPPQGRNNKRLKLVRTHPVQLPVTHKVIRHRPNLQKELRFRKNNTGCYYNMDWGLQSVWVGPSRQARFIHLNKEKETSKKLSFQSAPYTSKKSLFHNRGMLQNIKYNSLQRIDNMLHSYRIRTLKSLKQQSQPTTGESSLSKPRVGIQGPLASAGAGLSQKELMKKIYVKKQKPMAVIGGPSSSSQKKTTAPVQKKKQ

SEQ ID NO: 4851 - DNA, 4792 bp, Naegleria lovaniensis
  source 1..4792: mol_type = other DNA
atgattatgaaaattggtcaattaagtccatccaaacccttaccattaagacaagcacaaccatcatcgaacaagtccaatgtatcaacgactccaggagaaccttattcacagtcggaagaggatttaattgtgacatccttgcggaagggaatgaatttggaacaaatttaccgagattactttaaacaccgaacatttcagtcgctgaaaaataaggttcgacggttaagaaaaaggcaactctatcacaaacaacaaccatcgaagaagagattgaataaaagaaggatggttcccaattccactgtttcaactgattcaaaggagttaagaaaaccgttttggcatgatgatacggttgatcgtttgaacaagatttgtcccgtgtcatgttttgccaagaatggtttgaaaataccgacccaaagttagttaccctctccgttcgccaacgatgtccatccacagaaccacctccgagcaagaaggaattggtagaaaaagtgtggagtaaatcagaaacttggaaaaagacgccatgtaagtgtggaaattccaagtttaaaaggacagtctgctcgttcaacggacgcaagttcgggtcagaaaagaagaagcttgttcaggaattcaaggaagtatctgcgttggaggagtctttaacaatgcttcaagagaacggagtgaattcatccacgactgctgagaatgaagtgagttcatctgcgactactgtgaacgaagtgaattcatccactactgcagagaatgaagtgaattcatctacgattgctgagaatggagtgagttcatccactactgctgagaatggagtgagttcatctatgactgctgagaatggagtcaattcatccactactgcggaatcaaaggaaaaagctgatgacactatcgagaaattgctaaaacaaatttacacctccttctcaatctcaaacgaagacaattattttgtgagaacaaagaaagtgagattgaaactcacctcagaacaaaagaaggtctttgaaagatttttcttcaattctaaccatacttataacgaagcatgtctccttcatttcatgttagagcaaaacaagggaaaaacactccttaccaccacagaagacgattactttaaaattttgaagaatccccaaaccaacctgagattcaaacaaactaggtggctatgggatcaagagttgaaacattgtccagcagatattaaattgaacgctgtgaaggattttgtcaaggctgagaaaattactagatataaaaacaagcaagcagcagaaaaggaatccaaagaggctgctcgaaaggccaaatccaaatttcttaaagatgttcaaaaaggaaagaaggagatgattactgatgaggaattgaacgaaagatttaatcccaagcattttactcgacaacctcgtgaattcgaaatgaaaggacgaagcaatcaacatccatatcagtcgttcaaggtgacaaacatttcattatcacaggaaggagtgttgttaaaacctaccttttttaaagggaatgaaagtgcatgtccttccaagaaatctacggatcatcttttgaaattttattatcctgcaagagcacgaaagtggttaaaggaagagattggtatgtatatatatgtatttcgattttacttacatgtgatttgaatctcttacatgaatgtgattgatttatgtgattggaacttttctgaattctaatttttccatgatccgtctgcccatcgcctacccaaacatcaagacaacaaaaaattttcacacgagacaacctttgtaagagaaagaggaagatattttgtttgccttccagtccgttatcacaaagctttaactcgacaagaattccaacggtttgataaaagcttttacgagtccaattcgaacagtggaactgaatatgacacgaaatttctcaaggactgcccacaaccttctcaagatgaactcagaaaggaatacattgcattggatccaggtgttcgatgcttcatgtatggttatgatagtaatggagacgcgttggagtttgccgctcaaggagaaaacaccatactcttttccctttctctaaagcaagatcagctcaggtcggaaattgccaagaacaaatttctaaaatacaattctcggcaggaacgaaaattttataagggtttaagaaaagccttaaaaaagaagattagaagactggaaagcaaaattagaaataaggtgaatgatatgcataacaaaattattgactatttaactttccactattctgaaattataatacctgaatttaatgtcaaggccatgattgctagaaaacaaaaacaaaggaagcgtcaaggaaaagaagataccacgtgtcaagttatatactaatggccaaacggagaatatggatgtgcgaacagaacctcttgttgcatcgtcttcaccattcgaaggatgggaatcaagggacaccaccacaagtgaaaccaccaccaacacttccgaatgggttggaagaaaaattactagaaaaactgttcgccaaatgttgcgatttcgacactatgattttcgaatgaaactcttgcaaaaggcagaaatgcgtggatgcaaggtacatgttgtcacagaacaatatacatcgaaaacgtgtggaaattgttcagtgatcaaggaagacctttatggaagcaaatggtttcattgcaatcattgtcacttccacatccctcgtgacggtaatggagcaagaaatattttgatcaagaattaccatcatttattacattggtaagttgaagagacaactaaaatgattcatcattcgggccatagatctatataataataactatgtgattatcattctgtcaagatgataattccgtctctcgtgtgagagatgagtatgtgatcggagcactttaaaacaccaaaaaatcattgttatcattgatggagtatggtgtgctctccgagtaagttgttgttgttgttcattatttttaacgcgtgtgactttttaattttgtaaagacatgttactttatttcttcaacagggtcatcaatgatcttgttgttctgacgcatcatcgattactgcttcttcttctgaacaggtgctgtcgtcttcttttgactcgaactcgatggtcctccaatcactgccattggtttttgtttcttgacataaatcttcttcatcaattccttctgactcaaacctgcaccagcagaagcaagaggtccttgaattccaactcgtggtttactcaaactcgattcacctgtagttggttgagattgttgcttgagtgatttcaatgtacgaattcgatacgaatgcaacatgttatcaatacgttgtaaggaattgtatttgatgttctgaagcatgccacgattatggaagagactcttcttggaagtgtaaggtgcactttggaaggacaatttcttggaagtttccttttccttattgagatgaatgaatctggcttgacgagaaggtccaacccaaacgcctatcattcatttcacaaaaaataacagatggatttaatcaatcatgaattcgttggtataaagaggttcaaaaggtaatgagtaaaaattggttggaaaaaagtattattattaacattcatctacttactttgcaaaccccaatccatattgtagtaacatcctgtgttgttctttctaaatctgagctccttctgtaaattgggtcgatgacgaatgaccttgtgagtcactggtaattgaacagggtgtgttctcacaagttttaatctcttgttgtttcgtccttgtggaggtgttgttctcattgttgttgttggtaagtttatactgtgtgaattgtttaaatcgatagaaggtgtgtttttttcaaagaaaagcatggaggtcccgtctctcgcgtttatacatctcgactgggccagacatttgacctattctggaaaactgccttttactgacaagtgacaattttaatgaagaggcttcactgctcataaaaaattgaagaacaatttatttcttgattgtgattattctaattgaaagatttctcattattaacccttaaggtataatgcatggaactgtcagtgcgaaagttcaatcacagaaaagttagtaaaaacgaaatcttttaaagcatcttatcatggtgattggaggctgcaccaatgcttaaaccagggttaactgtccaatcagctgagctccgatcaagtctcacaccttcacactctactcaaaatagatggtctgatcaggattctcctctttatgcaattttaacaataaagcattgtaagcagagagtaccaatatcttgaccttttttaaatatttcaacatggtcgagtctacgaatatttgctccaatttcaagaaggtgagatttgggaaatgctgaaattcatctgcttccatgtgcatacatccgcttggaatggttagagaggtgacattgttcgcaggtgcattctcaacaccaccaatcgagccaatatacttctccacatgaattggaatgtgtgtaggtatatatttcttgtaggtagctttgagaatacactccagtgtcttgagtttggttcttgaatcgagttgttttaggaattggttcattgtcgctggcttgaaaccaacaatatttctcaaatgcaattcattcaggtttagataatattttgacgagttggtaatagagtccaatacttcactatcgtagttcgtctcgagtat

SEQ ID NO: 4852 - DNA, 4247 bp, Naegleria lovaniensis
  source 1..4247: mol_type = other DNA
tcgttcaaatttgcaagtgtatcacttcgaaaggatcgggaaattattgagattgcactgacaaagagcatttccaatattgatcatgttcccgaagatattcgagatgaaattagaaataacttcaactcgacgacgagtactccttctaataacatcacaagtgctgccactcaatggagtttgagatatctcaatgatgagaagagaaaacagagagatttagtattgaaaaatatttcactcaatcccttatcacttcaatatgcagatgattcgcttaaaaacgataaagaagtggtcatggaagctgtgaaacgaaatggaacctctctcatgtatgccagcaatgaattgaaacgagatcgacaagtcgccattcttgcatgttcaagcaaaggaaatggctttcgatatgtggatcccatatttcgcacagatcgagaagtagtgaccattgcagtttcaaactttggaggaagtttggaattggttgaaaaagagtttggaaatgattttgaaattgtgatgaaagcagtttcgaattatggacttgcattacaatttgcaagtgaagaattacaatcaaatattgaaattgttcgagctgccattcaacaagatccacaagctctccagtttgcatcagaatgtttcaaaaacatcaacactaagagtttgaattgaatttaaggaatgtgtattcaaaggctctctcggcccaaaatccaaattccatacggaacggaataataattgagaataattattattggtcatccgacacaagaattagttttggtttatgcagagttcagtaatgaacgagaacatgtgttcgagtcatgcaaaatagaaaggatttggattgaattttgcaattcctagagaaaattcaatccacagaaagcacataaatgtccaactaacatgagttcatgccaaaagaacaggatcaagtgatgtatcttcaggagcatcagatgtagcacaccatatgatgaagatccttaaattgttgttgctggagttgtgcaattaagcagtatttttgcaaccatccccatccgggctattagctgtgtgctaggatgggcgatttcttccacccctcgtacaagtactggtagtgtagatatcacttatccagaagttgaattaaaaggtacttacataaaactcaccactacctcattcgtaagattggatatggtagtgccagttaaaataagtgatttgaacatcaattccaataacatcgaaacactagacaacactgatagaaagaatattttcgagcgttttattattattctttccaaagacggcaaggaaatagaaacattgaatacctaccaaaagtatctataaaaattgtatattggttcaattaattgctggtgcttgtttgttggctgattgtatttctcgaataatcccagatacatccttttttatctcctcttcactcagaccctttgggtaccccggatctgggagtttgaaggtttctaaaaaattgggcatcataacatagttcttctttgttgtttgtttattcattgatttgttcttgttagcaatgttgtaggaaataaagtgtgcacttgggtgtgtataaagaggtgattattgattgcttagcatggtagtcagtggttattttttaaatgtattaataaacacatcgttatcaaactattataaattgtgttttcaattgatcgtttcaaataaaggaaatgcatcataataatgccaatgtccgttaattgattccaacacaattcagtagatgttgaacattaaaccaattactaaagtaagtaaaacaaaggacgtttcagtacccaggtgaagagctgtacaattcaggatttattcagattgattattaaatgaaacatcttctgagacagtagattctgactgtgttacttcaccagcaacctgggcaggtatgaatgatgatgaaacttcgacatgatgtgttggaaattcttcgggatgatttcgttgtccatcatgtggctcaatttttgacagagatatcaatggagcaagaaatattcttcttcgattccttactactcatagaattagtttttgagcaccttgtgtgttgggtcttccccaccttgtgtgcgttgggtcctttcccctggctttcactctttgagtgtttgcttgcaagatcagcactttgttcgatttgttttgttcaaattgttgatttaaataaaggcgaacccaaattggacacaaagtggaattgaaagcgcacattaaaaaaaatattagcatcatcatcgacttgagtctttttcagattccattcggcgaacctattcatcggagagagagcgaaggacgcacgaccacaccacgctcgaatcatcaaccaagtcgtgaggtattcgtgagtttttgaaacaatcacattgttgttgaattgtccgttgatcaaaacaaacatattgaaactgaaaatttagtgattgtcgagttgtaacaattataatttattatatatatatacatacaatcatcatcatctattcaccaacaataatttttgacacccatgtcgaactcacgtagtgaaagtaacaatccgaaacataattatgatgacgatgatgataatgattatgacgataaatacaagaaatttaccgatcctacagaagcagccaaacacacatttcaaaacgtagatcgtattttgggctctgcaagtagtacatcgaaaacaagaaattcacaccactatggaacattgcaaatcagtggtgaaggtgacgatgttcatcccattcaggactccactgccgtaggtaccaatgaaaaggagcctggcaaaaagagtaacattcagcaaggtaaaaaagtcatcacttcgggatggggatatgtgaaagagttcttttatagtttgatgttcagtttgatctatgtgacatcggacactaaaaagagatgtaccaggtaggttttttaaggaaaatttcacttgttatcgatttaaaattatgaccaaatatttgacaacttgtgtgactcacttcaaattggcgatctgacacaatagtttccttgttggtttaataaccattgccattgtggtatttgtcgtcagtattctctacaattccattcttaaggcaaatttgatttttcttaaattgtctgaggacaatgttggagacgctgatatcatgttcacaccaaaattcacaaactctaccaccataccttttattaatcacacagagattgcaaaaaaactcaatggtaatcccttcattgttggaacaagccctcgatggattttatttgccaatctccaaaatcgagatcatcctcacaagaatctaagtggaattttattaattgtcgatacagaaagagaagaaaggttaggaattggtcgtatttggccttacagacctttaggagaaggagaaatgcatgtcagagattccattcttcgtgctattgatattgttcctgatcgtggcaaacgtgtcaatatggttgttgattttgcaagcttggcaagcgccttttctggaactgacgaatccatttcacagggagtcacaccagatcaacaaacgatcaatcaaaccgaattattgagaaccttatttgaagcatcaggatttaacttttcgcaaacgttcaatgtaaatatcactcaagtagccaatcaattgggaattcaaatcccaccaccgttgaaacccttcatcaatgcatttggaattatcacaattactggagaacaagcatttcaagcaattgcaaccacattaggaggaggaaatttctcagatttaaatttgaaagtggaaggagaatatactgtggtgagctcaatcaattccaactatgcaaaatatccaggtgctctgggtaatattatgatgattgacagcgcctatgttggaaaagtgattggtcaatcgttgtttcgatctccagccattcaattattgttggagctttctggagatacagagcgtatcaaaaactttttcaacacattcccgatagaacaatatgcgttgacggctgtaggaaggtttaaagatcgatttccggcctatttgaagagctctaacgaacggactgatcaaatgattcaaatcacaaatggaatgatggattctcttggagtctcttatccagtttcatatactcttccactattgagcgcattatctgccactcaattcatttct

SEQ ID NO: 4853 - DNA, 4251 bp, Naegleria lovaniensis
  source 1..4251: mol_type = other DNA
tcttttttgatagatccatcaactcattgaagaaaaagtacaagaaattgaaaagaaagattaatcgtgccagattggaaggagcgtatgatgcttcagatgcaacaaattttatcattcaatggagtgtcgatgatttaaccttttcagaattcactgatagtaacacctttacctctactgtatcgataacttttcctgaaacatggaccaattctgaccattaccagaaaatgattatgaaaattggtcaattaagtccatccaaacccttaccgttaagacaagcacaaccatcatcgaacaagtccaatgtatcaacgactccaggagaaccttattcacagtcggaagaggatttaattgtgacatccttgcggaaaggaatgaatttggaacaaatttaccgagattactttaaacaccgaacatttcagtcgctgaaaaataaggttcgacggttaagaaaaaggcaactctatcacaaacagcaaccaacgaagaagagattgaataagagaaggatggttcctaattccactgcttcgactgattcaaaggagttaagaaaaccgttttggcatgatgatacggttgatcgtttgaacaagacttgtcccgtgtcatgttttgccaagaatggtttgaaaataccgacccaaagttggtttaccctctccgttcgccaacgatgtccatccacaaaaccacctccgagcaagaaggaattggtagaaaaagtgtggagtaaatcagaaacttggaaaaagacgccatgtaagtgtggaaattccaaggttaaaaggacagtctgctcgttcaacggacgcaagtttgggtcagaaaagaagaagcttgttcaggaattcaagcaagtatctgcgttggaggagtctttaacaatgcttcaagagaacggagtgaattcatccacgactgctgagaatgaagtgagttcatctgcgactgctgtgaacgaagtgaattcatccactactgcagagaatgaagtgaattcatctacgattgctgagaatggagtgagttcatctacgactgctgagaatggagtgagttcatctacgactgctgagaatggagtcagttcatctacgactgctgagaatggagtcagttcatctacgactgctgagaatggagtcaattcatctacgattgctgagaatgaagtgagttcatctatgactgctgagaatggagtcaattcatccactactgcggaatcaaaggaaaaagctgatgacactatcgagaaattgctaaaacaaatttacacctccttctcaatctcaaacgaagacaattattttgtgagaacaaagaaagtgagattgaaactcacctcagaacaaaagaaggtctttgaaagatttttcttcaattctaaccatgcttataatgaagcatgtctccttcatttcatgttagagcaaaacaagggaaaaacactccttaccaccacagaagacgattactttaaaattttgaagaatccccaaaccaacctgagattcaaacaaactaggtggctatgggatcaagagttgaaacattgtccagcagatattaaattgaacgctgtgaaagactttgtcaaggctgagaaaattactagatataaaaacaagcaagcagcagaaaaggaatccaaagaggctgcccgaaaggccaaaaataaatttctaaaagatgttcaaaaaggaaagaaggagatgattactgatgaggaattgaacgaaagatttaatcccaagcattttgctcgacaaccatgattgctagaaaacaaaaacaaaggaagcgtcaaggaaaagaagataccacgtgtcaaggacaagaaggttatactaatggccaaacggagaatatggatgtgcgaacagaacctcttgttgcatcgtcttcaccattcgaaggatgggaatcaagggacaccaccacaagtgaaaccaccaccaacacttccgaatgggttggaagaaaaattactagaaaaactgttcgccaaatgttgcgatttagacactatgattttcgaatgaaactcttgcaaaaggcagaaatgcgtggatgcaaggtacatgttgtcacagaacaatatacatcgaaaacgtgtggaaattgttcagtgatcaaggaagacctttatggaagcaaatggtttcattgcaatcattgtcacttccacatccctcgtgacggtaatggagcaagaaatattttgatcaagaattaccatcatttattacattggtaagttgaagagacaactaaaatgattcatcattcgggccatagatctatataataataactatgtgattatcattctgtcaagatgataattccgtctctcgtgtgagagatgagtatgtgatcggagcactttaaaacaccaaaaaatcattgttatcattgatggagtatggtgtgctctccgagagtaagttgttgttgttgttcattatttttaacgcgtgtgactttttaattttgtaaagatctgagccgccctcattccgctgaatgagacaatttttcaacaccacaaaaaatcaaactcactcctgtctctgcgcactttagcgacaatcattatgaagtacctaacgagccttgtcgttgtgctgctacttcttgtcgtttgttacagccaagtccgatacggtgttgaaggcttccctgtccatgccaagtctcatcatcacaataatattcgtatcgctgcttcctcgtccaatgcaaaagttgcttctgatgatgattacaaacccattgaagtacacttggcttttacttccgttccaaatcaaatggtggtcacatttcatacagttaattatgatgagaagaagttaggaaagcccattgtaaagtatagctccaacgacgcatcattgaaacgagattttagagtagctcatttgggtggtgttgtaacacaatacggagaaatttctcaaacaggatttgacatgagtgtgttactctcaaacttggattattcaactaaatattattatcaatgtggattcatgatgaacgataatgtgacttctgatatttattatttccacacaagaactgatccacgattgagtgaaagtttcgagactactgttgtcatgtatggtgatcaaggaacaaccaatagcaaacatgtcattgctcaagtaggagactttgtgaagagttttaatgataatggaaccaatcacaagaatttgtttgtgtatcatttgggtgacatttcggtaagtgtctcgattgaaattcatgaaaagtgttttaacataaactcaatctcagtacgctgatgatttccctggattgatctatcaagccatttggaccaagtacatgatcatgatggagaagatcatgccctacacatcttatatggtacttcctggaaatcacgaggtaggtgctcatgtttagcatgtttttcaatttgattttacattctcgtcaactaaaatgttattgtccatgtctattttttccatgtggatccatgtctcgatatcaacaactttagaaaggaccaaaactcgaaccttatcacaaatttgaattaggtttcatggcttacaatcatcgtttctttatgcctcttcgaaatacctcccaatatggtcacaatatgtggtattcttttgaacatggacctattacctttgtttcaatttccactgaaaccaattatccaaatgcattctattctgaatatgattttaagggagaccaattggcatggcttgaaaatactcttgcttcgattgatcgaaagaagacaccttgggtgattgtagttggtcatcgacctatctattcttcaaaacatggttatagtactgcagatgggcaagtctctggccaatctcttcgaattcaaagtgcctttgaagatgttattgtgaaatatcatgttgatatcatgatggttggacatgttcattcctatgaaagaacttatccactctacaagacacaagtcgaaagaaaggataatttccataatttaagatatcctattcatattgtgaatggagctggtggttgtattgaaggtgtaagtagaacatttttcgagatatgtaaaatatggaaaacaacacttgttgaatttgccaaatgaattcgtgataattgaaatgcaacgacttgaacacatcaaacaggtcacacacgaatgggatattcattttggtcataattggagtgcta

SEQ ID NO: 4854 - DNA, 4800 bp, Naegleria lovaniensis
  source 1..4800: mol_type = other DNA
  variation 29..38: note = n is a, c, g, or t
ccttttttaaagggaatgaaagtgcatgnnnnnnnnnnttaagtccatccaaacccttaccgttaagacaagcacaaccatcatcgaacaagtccaatgtatcaacgactccaggagaaccttattcacagtcggaagaggatttaattgtgacatccttgcggaagggaatgaatttggaacaaatttaccgagattactttacacaccgaacatttcagtcgctgaaaaataaggttcgacggttaagaaaaaggcaactctatcacaaacagcaaccaacgaagaagagattgaataagagaaggatggttcccaattccactgtttcgactgattcaaaggagttaagaaaaccgttttggcatgatgatacggttgatcgtttgaacaagatttgtcccgtgtcatgttttgccaagaatggtacgaaaatactgacccaaagttggtttaccctctccgttcgccaacgatgtccatccacaaaaccacctccgagcaagaaggaattggtagaaaaagtgtggagtaaatcagaaacttggaaaaagacgccatgtaagtgtgggaattccaagtttaaaaggacagtctgctcgttcaacggacgcaagtttgggtcagaaaagaagaagcttgttcaggaattcaagcaagtatctgcgttagaggagtctttaacaatgcttcaagagaacggagtgaattcatccactactgcagagaatgaagtgagttcatttgtgactgctgtgaacgaagtgaattcatccactactgcagagaatggagtgagttcctttacgattgctgagaatggagtgagttcatctatgactgctgagaatggagtcaattcatccactactgctgagaatgaagtgagttcatctacgactgctgagaatggagttaattcctccactactgcggaatcaaaggaaaaagctgatgacactatcgagaaattgctaaaacaaatttacacctccttctcaatctcaaacgaagacaattattttgtgagaacaaagaaagtgagattgaaactcacttcagaacaaaagaaggtctttgaaagatttttcttcaattctaaccatgcttataatgaagcatgtctccttcatttcatgttagagcaaaacaagggaaaaacactccttaccaccacagaagacgattactttaaaattttgaagaatccccaaaccaacctgagattccaacaaactagatggctatgggatcaagagttgaaacattgtccagcagatattaaattgaacgctgtgaaagactttgtcaaggctgagaaaattactagatataaaaacaagcaagcagcagaaaaggaatccaaagaggctgctcgaaaggccaaaaaccaatttcttaaaaaggttcaaaaaggaaagaaggagatgattactgatgaggaattgaacgaaagatttaatcccaaacattttactcgacaacctcgtgaattcgaaatgaaaggacgaagcaatcaacatccatatcaatcgttcaaggtgacaaacatttcattatcacaggaaggagtgttgttaaaacctaccttttttaaagggaatgaaagtgcatgtccttccaagaaatctacggatcatcttttgaaatttatatctgcgagaaatgttaagagagattggtattatatatatgtatttcgattttacttacatcatgatttatctctcatgaattgactgatcatgtaattgactgaatctaatttccatgattgcccaaacaagacaacaaaaaattttcacacgagacaacctttgtacgagaaagaggaagatattttgtttgccttccagtccgttatcacaaagctttaactcgacaagaattccaacggtttgataaaagcttctacgagtccaattcgaacagtggaattgaatatgacaagatatttctcaaggactgcccacaaccttctcaaaatgaactcagaaaggaatacattgcattggatccaggtgttcgatgcttcatgtatggttatgatagtaatggagacgcgttggagtttgccgctcaaggagaaaacaccatactcttttccctttctctaaagcaagatcagctcaggtcggaaattgccaagaacaaatttctaaaatacaattctcggcaggaacgaaaattttataagggtttaagaaaagccttaaaaaagaagattagaaggctggaaagcaaaattagaaataaggtgaatgatatgcataacaaaatcattgactatttaactttccactattctgaaattataatacctgaatttaatgtcaaggccatgattgctagaaaacaaaaacaaaggaagcgtcaaggaaaagaagataccacgtgtcaaggacaagaaggttatactaatggccaaacggagaatatggatgtgcgaacagaacctcttgttgcatcgtcttcaccattcgaaggatgggaatcaagggacaccaccacaagtgaaaccaccaccaacacctccgaatgggttggaagaaaaattactagaaaaactgttcgccaaatgttgcgatttagacactatgattttcgaatgaaactcttgcaaaaggcagaaatgcgtggatgcaaggtacatgttgtcacagaacaatatacatcgaaaacgtgtggaaattgttcagtgatcaaggaagacctttatggaagcaaatggtttcattgcaatcattgtcacttccacatccctcgtgacggtaatggagcaagaaatattttgatcaagaattaccatcatttattacattggtaagttgaagagacaactaaaatgattcatcattcgggccatagatctatataataataactatgtgattatcattctgtcaagatgataattccgtctctcgtgtgagagatgagtatgtgatcggagcactttaaaacaccaaaaaatcattgttgtcattgatggagtatggtgtgctctccgagtaagtgttgttgttgttgttcattatttttaacgtgtgtgactttttaattttgtaaagacctgtaatttttgttctgaggttatcagaattgagagaaaggcatccccaatggatctaatgaatgagacgtctcttgtgtgatcccaatgtttttccatttcttgaattggattttgaaaatattcctccaaaaagtaacaaaccaaaccattgccaaatgaaaaataatcccacaattaatacaaacacaatttcaacaccactttgaaatctcattttggaagcgattgcgttttgtcgagatctcaaactggtccaagtttgatgagaagtgtcagagccgtgatgttgaaaagctgacgacacttgaaggatggaattttcatgttttcttgcctgttgttcttgaacttgtcttaatagagaaagccagtagaaaaagtagaattgtttgcatcgcttgggatggtctgtatggaatcgtttcattttcaagtcaatatcgagaagagtttcgtccagcaatgctttcttttgtgaatctacagaaatgttggatgtgaaatttgacagggaagaaggattatgtacaaaggcagaattcgattctgtaggttgttgaagttgagaactatttctaaagacttttccatttttgtgagtggaattggtaatgtcatgaaattcttttcgtttcaagtgaaaactcaatcgaatgactctttctctccagaattgagtcgactctgttactacttcataccattctcgacatgtgagtaaaacactgaaaatgttagcacgagcaaaagcagacaagaaatcttcttcacacaagaaggaagtattggttgtggctgtggttgcagtagtgaaaccattcttgttggagactccacctttctgaaataaatagctaaaaatgttttcgagaatttcacgaggcaattccttaatatggtgtcgctgaggacttgaattggtttgttgacagttgtcagatttgctgttgcttctggagaaattgtgaggagagaggtacaaagattcagaagaggtgtttgaatgggaggtacttttgagtatcaacagtcgattcataacaagagttaaaccatcgaataattgctgaagttttcgaggagtgacagcatgtaaaagttttgacaagtgactttcatctccaccagagtagtgtgccacttgatgataataatagttgagtaaatatcttccattttcatcccattcatgaatcaattgttcttttgcatccttcaacaattctttaagcttcctcaataaattaccaaatttagagaaaccacttctcaacatttcttcactttcttcaacgacactaccacatggatcatctctgaatattctctcaacccttctcctttccataccaactcctcttctcccacgttcttcttcattctgtcgttgatctgaattctcaataaactcgtcactctcctccatttcgtttccattcatggatgattcctcctgatcagagtccgacaccaattcttcttctaaactttcagtttcaatcgaaaaggtttgactttcacataacgacgatggtgatcgatacatgtaagaatcatctccagccatgacatctccttgtgcatcatttaccaattcatgttcgataaggatgtttttgaatcttgtttgattatttgaatgattatttgtttggttgttattgttgttaagatttaattgttgttgtaataacaactctccaacaagatgaaatgaaggagga

SEQ ID NO: 4855 - DNA, 4800 bp, Naegleria lovaniensis
  source 1..4800: mol_type = other DNA
catggaccaattctgatctttttcacaaaatgattatgaaacttggtcaattaagtccatccaaacccttaccgttaagacaagcacaaccatcatcgaacaagtctaatgtaccaacgactccaggagaaccttattcacagtcggaagaggatttaattgtgacatccttgcggaagggaatgaatttggaacaaatttaccgagattactttacacaccgaacatttcagtcgctgaaaaataaggttcgacggttaagaaaaaggcaactctatcacaaacagcaaccaacgaagaagagattgaataagagaaggatggttcccaattccactgtttcaactgattcaaaggagttaagaaaaccgttttggcatgatgatacggttgatcgtttgaacaagatttgtcctgtgtcttgttttaccaagaatggtttgaaaataccgacccaaagttggtttaccctctccgttcgccaaagatgtccatccacaaaaccacctccgagcaagaaggaattggtagaaaaagtgtggagcaaattagaaacttggaaaaagacgccatgtaagtgtggaaattccaagtttaaaaggacagtctgctcattcaacggacgcaagtttgggttagaaaagaagaagcttgttcaggaattcaaggaagtatctgcgttggaggagtctttaataatgcttcaagagaacgaagtgagttcatccacgactgctgagaatgaagtgagttcatctgcgactgctgtgaacgaagtgaattcatccactactgcagagaatgaagtgaattcatctacgattgctgagaatggagtgagttcatctacgactgctgagaatggagtcaattcctccactactgcggaatcaaaggaaaaagctgatgacactatcgagaaattgctaaaacaaatttacacctccttctcaatctcaaacgaagacaattattttgtgagaacaaagaaagtgagattgaaactcacctcagaacaaaagaaggtctttgaaagatttttcttcaattctaaccatgcttataacgaagcatgtctcctttatttcatgttagagcaaaacaagggaaaaacactccttaccaccacagaagacgattactttaaaattttgaagaatccccaaaccaacctgagattcaaacaaactaggtggctatgggatcaagagttgaaacattgtccagcagatattaaattgaacgctgtgaaggattttgtcaaggctgagaaaattactagatataaaaacaagcaagcagcagaaaaggaatccaaagaggctgctcgaaaggccaaaaaccaattttttaaagatgttcaaaaaggaaagaaggagatgattactgatgaggaattgaacgaaagatttaatcccaagcattttactcgacaacctcgtgaattcgaaatgaaaggacgaagcaatcaacatccatatcagtcgttcaaggtgagagatatttcattatcacaggaaggagtgttgttaaaacctaccttttttaaagggaaggaaaatgcatgtccttccaagaaatctaaggatcatcttttgaaattttattatcctgcaagagcacgaaagtggttaaaggaagagattggtatgtatatatatgtatttcgattttacttacatgtgatttgaatcccttacatgaatgtgattgattcatatgattggaacttttctgaattctaatttttccatgatccgtctgcccatcgcctacccaaacaacaagacaacaaaaaattttcacacgagacaacctttatacgagaaagaggaagatattttgtttgccttccagtccgttatcacaaagctttaactcgacaagaataccaacggtttgataaaagcttctacgagtccaattcgaacagtggaattgaatatgacaagatatttctcaagggctgcccacaaccttctcaagatgaactcagaaaggaatacattgcattggatccaggtgttcgatgcttcatgtatggttatgatagtaatggagacgcattggagtttgccgctcaaggagaaaacaccatactcttttccctttctctaaagcaagatcagcttaggtcggaaattgccaagaacaaatttctaaaatacaattctcggcaggaacgaaaattttataagggtttaagaaaagccctaaaaaagaagattagaaggctggaaagcaaaattagaaataaggtgaatgatatgcataacaaaatcattgactatttaactttccactattctgaaattataatacctgaatttaatgtcaaggccatgattgctagaaaacaaaaacaaaggaagcgtcaaggaaaagaagataccacgtgtcaaggacaagaaggttatactaatggccaaacggagaatatggatgtgcgaacagaacctcttgttgcatcgtcttcaccattcgaaggatgggaatcaagggacaccaccacaagtgaaaccaccaccaacacttccgaatgggttggaagaaaaattactagaaaaactgttcgccaaatgttgcgatttagacactatgattttcgaatgaaactcttgcaaaaggcagaaatgcgtggatgcaaggtacatgttgtcacagaacaatatacatcgaaaacgtgtggaaattgttcagtgatcaaggaagacctttatggaagcaaatggtttcattgcaatcattgtcacttccacatccctcgtgacggtaatggagcaagaaatattttgatcaagaattaccatcatttattacattggtaagttgaagagacaactaaaatgattcatcattcgggccatagatctatataataataactatgtgattatcattctgtcaagatgataattccgtctctcgtgtgagagatgagtatgtgatcggagcactttaaaacaccaaaaaatcattgttctcattgatggagtatggtgtgctctccgagagtaagttgttgttgttgttgttcattatttttaacgcgtgtgactttttaattttgtaaagggttgcttgacaaattctttgccaatattaatctattgccattgttagctcgagcctgttgttttcgttgaagttttgcacgattaagtttgtcaattttcatcgatctttgaaatgctaaactctctttgaagcgatgatgtgtgtccaacaagacaatgcaaatctcttgctcaacggtgtcaaataaataatctggtaatacatcaatggttcccttggcgtagctatccatttgctccttaacttgctcagaaatcttcttattaatgttcacacttttgtctccatggacatcaaggtattctgtataaatttcaaaagcaacctcatacttttcggattcgaccttgtccatgtctttttcattgtattgccttttgaacatgaaatttcttaatcgcttggaatctcgatcaccagcattaccaccatttcttctgcctcgaaatgaaggcgatggagagtcatcaaacgcaaatgtatgtgcggctgtaatagtctttcttttcgtggtggaagacgtttctccttcgttgttgttattgttgtctggatcatagatttgtagttgtatttccaaactcttttcacataactttttgtattcactaattttctcgagaatggtaaaattttcagaggcatattcttgttcacaatgctttctaaataactcacgaagagtttcgttttgcatcgtatctaatagcatgacagcattcgcctgtttttcatttatgaccaccaaatattgttcgtatgaaaccattcgaaattattacgaaacctcaatacgagcatgtcacataccttattcaatcgattcaagtaaagagaatctctattcactgcacaaacaattattgcaatgattagaggtacaagaaaggcagaaacagccaaaacaaccacgagtcccatcaatgaaaggagtagcatttgagatgtttcgtgctgatcaatttgataaaagtatccaatcattggcttaattagagtcatggttagatcttgaatgtttttggtataattggtgctctcaagaaattgtaaggcgtttagtggtgttccttgtttcaccatttccattgcttgttgttccgattgtaaaaacatggattggttatatgtttttaccaaataatctggtaagctcggtagtaataaatccattcgtttggtcaatatttcataatgggattcaaatttttccaaataattcttggtttgattttgtaaagtaaaattaacatgttgtgtcatgaagggtgagcaactagcagaaagtgcagtaagcttggcataatgttccatacgttctcgatggagatccaaattttgtgcagtgttcgaaagaagggatccactcatctcttgtctctcattgatgtaaatcatggacaataaaacagctagccaaataaacgcagcaatgttcacaattaaagaaatcaaggcgattaacctaaagcaagaaaactcaatggttccacaacaggtgtgaagttgtacttgtcgtttctttttgtgtgttgaagtcacagattttccttccatgtcatttccagcactaactctggtcgaaaatattttcatacctggcacaatcgtggaaagatcagaagtggaatagatatgtgtaggagtagtctctaaattattgtgtttggtcatggatgataaaagctccataccagttggtggagattggcaacaacttga

SEQ ID NO: 4856 - protein, 136 aa, Naegleria lovaniensis
MYKRKENAYSNPEDLRVIAKNKDQGTNAAVDDPESMTNRVKRIHANDLENILPFFLVTVPYVLVSSLQVSSTTSPQYAIWDSVIGNVLMFSFTLSRYLYFVAYWRAWQPWRSLIWFWGLMTTVLIGIYTIVCLYVL

SEQ ID NO: 4857 - DNA, 4800 bp, Naegleria lovaniensis
  source 1..4800: mol_type = other DNA
aattaagtccatccaaacccttaccgttaagacaagcacaaccatcatcgaacaagtccaatgtaccaacgactccaggagaaccttattcacagtcggaagaggatttaattgtgacatccttgcggaagggaatgaatttggaacaaatttaccgagattactttacacaccgaacatttcagtcgctgaaaaataaggttcgacggttaagaaaaaggcaactctatcacaaacagcaaccaacgaagaagagattgaataagagaaggatggttcccaattccactgtttcaactgattcaaaggagttaagaaaaccgttttggcatgatgatacggttgatcgtttgaacaagacttgtcccgtgtcatgttttgccaagaatggtacgaaaatactgacccaaagttggtttaccctctccgttcgccaacgatgtccatccacaaaaccacctccgagcaagaaggaattggtagaaaaagtgtggtgcaaatcagaaacttggaaaaagacgccatgtaagtgtggaaattccaagtttaaaaggacagtctgctcgttcaacggacgcaagtttgggtcagaaaagaagaagcttgttcaggaattcaagcaagtatctgcgttggaggagtctttaacaatgcttcaagagaacgaagtgagttcatccacgactgctgagaatgaagtgagttcatctgtgactgctgtgaatgaagtgaattcatccactactgcagagaatgaagtgaattcatctacgattgctgagaatggagtgagttcatctacgactactgagaatggagtcaattcatccactactgctgagaatggagtgagttcatctacgactgctgagaatggagtcaattcatccactactgcggaatcaaaggaaaaaactgatgacactatcgagaaattgctaaaacaaatttacacctccttctcaatctcaaacgaagacaattattttgtgagaacaaagaaagtgagattgaaactcacctcagaacaaaagaaggtctttgaaagatttttcttcaattctaaccatgcttataacgaagcatgtctccttcatttcatgttagagcaaaacaagggaaaaacactccttaccaccacagaagacgattactttaaaattttgaagaatccccaaaccaacctgagattcaaacaaactaggtggctatgggatcaagagttgaaacattgtccagcagatattaaattgaacgctgtgaaagactttgtcaaggctgagaaaattactagatataaaaacaagcaagcagcagaaaaggaatccaaagaggctgctcgaaaggccaaaaaccaattttttaaagatgttcaaaaaggaaagaaggagatgattactgatgaggaattgaacgaaagatttaatcccaagcattttactcgacaaccatgtgaattcgaaatgaaaggacgaagcaatcaacatccatatcagtcgttcaaggtgacaaacatttcattatcacaggaaggagtgttgttaaaacctaccttttttaaagggaatgaaaatgcatgtccttccaagaaatctatggatcatcttttgaaattttattatcctgcaagagcacgaaagtggttaaaggaagagattggtatgtatatatatgtatttcgattttacttacatgtgatttgaatctcttacatgaatgtgattgattcatgtgattggaacttttttgaattctaatttttccatgattgcctgcccaaacatcaagacaacaaaaaattttcacacgagacaacctttatacgagaaagaggaagatattttgtttgccttccagtccgttatcacaaagctttaactcgacaagaattccaacggtttgataaaagcttctacgagtccaattcgaacagtggaactgaatatgacacgaaatttctcaaggactgcccacaaccttctcaaaatgaactcagaaaggaatacattgcattggatccaggtgttcgatgcttcatgtatggttatgatagtaatggagacgcattggagtttgccgctcaaggagaaaacaccatactcttttccctttctctaaagcaagatcagctcaggtcggaaattgccaagaacaaatttctaaaatacaattctcggcaggaacgaaaattttataagggtttaagaaaagccttaaaaaagaagattagaaggctggaaagcaaaattagaaataaggtgaatgatatgcataacaaaatcattgactatttaactttccactattctgaaattataatacctgaatttaatgtcaaggccatgattgctagaaaacaaaaacaaaggaagcgtcaaggaaaagaagataccacgtgtcaaggacaagaaggttatactaatggccaaacggagaatatggatgtgcgaacagaacctcttgttgcatcgtcttcaccattcgaaggatgggaatcaagggacaccaccacaagtgaaaccaccaccaacacttccgaatgggttggaagaaaaattactagaaaaactgttcgccaaatgttgcgatttcgacactatgattttcgaatgaaactcttgcaaaaggcagaaatgcgtggatgcaaggtacatgttgtcacagaacaatatacatcgaaaacgtgtggaaattgttcagtgatcaaggaagacctttatggaagcaaatggtttcattgcaatcattgtcacttccacatccctcgtgacggtaatggagcaagaaatattttgatcaagaattaccatcatttattacattggtaagttgaagagacaactaaaatgattcatcattcgggccatagatctatataataataactatgtgattatcattctgtcaagatgataattccgtctctcgtgtgagagatgagtatgtgatcggagcactttaaaacaccaaaaaatcattgttatcattgatggagtatggtgtgctctccgagtaagtgttgttgttgtttattatttttaacgcgtgtgactttttaattttgtaaagactttgtgctgacgtgtcattgaaaatcattgaaaaaaacaaaatttatttattcatcatgaaacctatggttctctatgattctatcgttctctcataaaacatcatcttacaacacatagagacacacaatcgtataaattccgatgagcactgtggtcatcaacccccaaaaccaaatcaaggatcgccacggttgccacgctctccaatacgccacaaaatacaaatatctcgacaaggtaaaactaaacattaacacatttccaatcacagaatcccaaattgcatactgtggtgaagtcgtacttgacacttgcaaggagctgaccaacacatacggaactgtcactaaaaagaagggcaatatattctccaaatcattggcatgaattctcttcactcgattggtcatactttcaggatcatctactgcagcattggtaccttgatccttgttttttgcaatcactcgaagatcttctggattggaataggcattctcttttcgtttgtacattcctgtgaagaaggccacaaagaacaaacgaagtgtgaggaggaaacaattgtaaacgaaaccttgcaggacaggattccaaagaagcatcaatgccattgtgtgatgtgtggttctgagttgaaatcaaactttcgtttttgtttggcgaatgtttttatgtgtgtgaaacgatgattttctatgaaattttattggaatgttgagataaggacggacaaatgcacaataacgattgggagtccactggacatcaggaggttcaagtatgaatcaaagcatgcgcgcacgtgttggttagtcctcagcaagaatccatgtcaatatccttgtcaatgacaacacctcttgacttttagttctactttgaatgcattattgcgtacgtaggaacgaattgcctcaatcgttgtctttccaaaatggcaaaaaagcatgggtcgatacagctgcatttcttcgatttacttctgattgaaattcaatttgttgttttggatattgagcccgagagatgaaagcgttgcgaccgttacgagaacaaacttggcgccaaaccgaccatgaccgttttacagaaaaaaaattgaatgaccatgttacaacaagttccctatccgcaacagcaactgcaacaacaacaacccatcatgaatgcatcaacggcaatgggaggatacatgatgcccagtacatattctggaaattttgtggcaccgactccgaatcaacaacaaggctattacaacttgaattcgtctcaatgtgttgttggacaaggccgtccttccacgccagtcgcccttccatcatcgacgacgagaggatatactgccaatcaacctatggacatgcattctgctcagcagggtcaggtcttgatcaataattgggtaaattcgcaaccaaactcaatgatgacccgaaaaccttgttgtctacctgagagtggcatttccaacaatcctaaatacttgcaagagctagaaggaggcgaatttcaagcgtacaatcccaacaagaagtacaaccgaaagaaaatttgttttgaggttgtcaaggaatcgaagcctagactcgaaaatcgatggcaaacagagcatcgagacaactttggatactatgcatgttcgaatgcaatggtgagtgattgtggagctagtgcaatcgatcaaagcgtcactatcccttttacaggaaatgtgccgccc

SEQ ID NO: 4858 - DNA, 4800 bp, Naegleria lovaniensis
  variation 3583..3592: note = n is a, c, g, or t
  source 1..4800: mol_type = other DNA
caaacccttaccgttaagacaagcacaaccatcatcgaacaagtccaatgtatcaacgactccaggagaaccttattcacagtcggaagaggatttaattgtgacatccttgcggaagggaatgaatttggaacaaatttaccgagattactttatacaccgaacatttcagtcgctgaaaaataaggttcgacggttaaaaaaaaggcaactctatcacaaacaacaaccatcgaagaagagattgaataagagaaggatggttcccaattccactgtttcaactgattcaaaggagttaagaaaaccgttttggcatgatgatacggttgatcgtttgaacaagacttgtcctgtgtcatgttttgccaagaatggtttgaaaataccgacccaaagttggtttaccctctccgttcgccaacgatgtccatccacaaaaccacctccgagcaagaaggaattggtagaaaaagtgtggtgcaaatcagaaacttggaaaaagacgccatgtaagtgtggaaattccaagtttaaaaggacagtctgctcgttcaacggacgcaagtttgggtcagaaaagaagaagcttgttcaggaattcaagcaagtatctgcgttagaggagtctttaacaatgcttcaagagaacggagtgaattcatccacgactgctgagaatgaagtgagttcatctgcgactgctgtgaacgaagtgaattcatccactactgcagagaatgaagtgaattcatctacgattgctgagaatggagtgagttcatctacgactgctgagaatggagtcaattcatctacgattgctgagaatgaagtgagttcatctacgactgctgagaatggagtcaattcctccactactgcggaatcaaaggaaaaagctgatgacactatcgagaaattgctaaaacaaatttacacctccttctcaatctcaaacgaagacaattattttgtgagaacaaagaaagtgagattgaaactcacctcagaacaaaagaaggtctttgaaagatttttcttcaattctaaccatgcttataatgaagcatgtctccttcatttcatgttagagcaaaacaagggaaaaacactccttaccaccacagaagacgattactttaaaattttgaagaatccccaaaccaacctgagattcaaacaaactaggtggctatgggatcaagagttgaaacattgtccagcagatattaaattgaacgctgtgaaagactttgtcaaggctgagaaaattactagatataaaaacaagcaagcagcagaaaaggaatccaaagaggctgctcgaaaggccaaaaccaaatttcttaaagatgttcaaaaaggaaagaaggagatgattactgatgaggaattgaacgaaagatttaatcccaagcattttactcgacaacctcgtgaattcgaaatgaaaggacgaagcaatcaacatccatatcagtcgttcaaagtgagagacatttcattatcacaggaaggagtgttgttaaaacctaccttttttaaagggaatgaaagtgcatgtccttccaagaaatctacggatcatcttttgaaattttattatcctgcaagagcacgaaagtggttaaaggaagagattggtatgtatatatatgtatttcgattttacttacatgtgatttgaatcccttacatgaatgtgattgattcatgtgattggaacttttctgaattctaatttttccatgatccgtctgccctttgcctgcccaaacatcaagacaacaaaaaattttcacacgagacaacctttgtacgagaaagaggaagatattttgtttgccttccagtccgttatcacaaagctttaactcgacaagaattccaacggtttgataaaagcttctacgagtccaattcgaacagtggaactgaatatgacacgaaatttctcaaggactgcccacaaccttctcaagatgaactcagaaaggaatacattgcattggatccaggtgttcgatgcttcatgtatggttatgatagtaatggagacgcgttggagtttgccgctcaaggagaaaacaccatactcttttccctttctctaaagcaagatcagctcaggtcggaaattgccaagaacaaatttctaaaatacaattctcggcaggaacgaaaattttataagggtttaagaaaagccttaaaaaagaagattagaaggctggaaagcaaaattagaaataaggtgaatgatatgcataacaaaatcattgactatttaactttccactattctgaaattataatacctgaatttaatgtcaaggccatgattgcaagaaaacaaaaacaaaggaagcgtcaaggaaaagaagataccacgtgtcaaggacaagaaggttatactaatggccaaacggagaatatggatgtgcgaacagaacctcttgttgcatcgtcttcaccattcgaaggatgggaatcaagggacaccactacgagtgaaaccaccaccaacacttccgaatgggttggaagaaaaattactagaaaaactgttcgccaaatgttgcgatttagacactatgattttcgaatgaaactcttgcaaaaggcagaaatgcgtggatgcaaggtacatgttgtcacagaacaatatacatcgaaaacgtgtggaaattgttcagtgatcaaggaagacctttatggaagcaaatggtttcattgcaatcattgtcacttccacatccctcgtgacggtaatggagcaagaaatattttgatcaagaattaccatcatttattacattggtaagttgaagagacaactaaaatgattcatcattcgggccatagatctatataataataactatgtgattatcattctgtcaagatgataattccgtctctcgtgtgagagatgagtatgtgatcggagcactttaaaacaccaaaaaatcattgttatcattgatggagtatggtgtgctctccgagtaagtgttgttgttgtatttttaacgcgtgtgactttttaattttgtaaagatattctttgttgtgatgatggaatacactcggaacgatctttctctgtcatggtatttcatgcaaataataaaaaaaaatgaaggacacaaagaaggctgtttgtttgtgcgtcgtattggggttggcttgtttggcgttgtatgcattcatcatcatggctgcaatgattgcggtaaagacaccagtgaaagacggaaaactgactttcgcaggatatttgaacaacaactaaagaaaccatgcatgtttaaggcatcgtatccgtaatcattcggaaccacatcaatcagtacttaactgaaaactcgtaacaattctcaactctccttcagctgaagatcttgttacgcctcttgatgagatctctaattgaatatcgatgactttataacccaacatggaaaattacgtttttgacttctttaaatgtcatgttgcttgattgagtttagctggttttgtattatttccaccattcaaaaatctttcattaattgaacatttttcaaccaaacannnnnnnnnngtgactttttaattttgtaaagacctgtaatttttgttctgaggttatcagaattgagagaaaggcatccccaatggatctaatgaatgagacgtctcttgtgtgatcccaatgtttttccatttcttgaattggattttgaaaatattcctccaaaaagtaacaaaccaaaccattgccaaatgaaaaataatcccacaattaatacaaacacaatttcaacaccactttgaaatctcattttggaagcgattgcgttttgtcgagatctcaaactggtccaagtttgatgagaagtgtcagagccgtgatgttgaaaagctgacgacacttgaaggatggaattttcatgttttcttgcctgttgttcttgaacttgtcttaatagagaaagccagtagaaaaagtagaattgtttgcatcgcttggatggtctgtatggaatcgtttcattttcaagtcaatatcgagaagagtttcgtccagcaatgctttcttttgtgaatctacagaaatgttggatgtgaaatttgacaggaagaaggattatgtacaaaggcagaattcgattctgtaggttgttgaagttgagaactatttctaaagacttttccatttttgtgagtggaattggtaatgtcatgaaattcttttcgtttcaagtgaaaactcaatcgaatgactctttctctccagaattgagtcgactctgttactacttcataccattctcgacatgtgagtaaaacactgaaaatgttagcacgagcaaaagcagacaagaaatcttcttcacacaagaaggaagtattggttgtggctgtggttgcagtagtgaaaccattcttgttggagactccacctttctgaaataaatagctaaaaatgttttcgagaatttcacgaggcaattccttaatatggtgtcgctgaggacttgaattggtttgttgacagttgtcagatttgctgttgcttctggagaaattgtgaggagagaggtacaaagattcagaagaggtgtttgaatggaggtacttttgagtatcaacagtcgattcataacaagagttaaaccatcgaataattgctgaagttttcgaggagtgacagcatgtaaaagttttgacaagtgactttcatctccaccagagtagtgtgccacttgatgataataatagttgagtaaatatcttccattttcatcc

SEQ ID NO: 4859 - protein, 532 aa, Naegleria lovaniensis; identical to SEQ ID NO: 2717

SEQ ID NO: 4860 - DNA, 4800 bp, Naegleria lovaniensis
  source 1..4800: mol_type = other DNA
atctccggtcataactggcgatttggtgcatccaccaataattttcctctaaggaataccaatattaatgtaaacaaaattatgggtcgatgggtgtcagatatgtgcctagttgcgctagacgatgttgtattgcagaagagcgatttcacctccatatttttttttcaatactcggaactaacccattagttttcctccaattaattccaaactcttgttgttgtttacaatgtagaaacatgatttgttctgaacgtagtgaagggcaggaatgtttcgattgtaaacaataaaagagtttgggttgagtattcgaaataattttcatgctcaaaaaattttctgcatactagtacttcgtctccctttgctttgcttactgacttcccacccatcgcactcccacccttatcatgctttcttaagcttttcaagttcctttttcgctgatccttaatgttcttgtggtaaggaaggacattatgacagtgcgggactgccttgttcgaatcttttcgacaagtaattgaacatttactttttaaccttattttaatatttatttattttacattactgtgacattatcaccacctttgatacttggtttatttatgatgatgtgagttgatcacaatccatcttcttcatcacttccttcttacttccttgcgtttctctggttttctcctttttttccgctgagcggtttttggagttttttaccttctacaccccttttcaaatactcgggactctgctcaataaagtctaatgacaaaatatgcagaaaatccctcaaacaccaatccttttccaaaggatggatgtttggcgagttacaaacccattagttttcctccaattaattccaaactcttgttgttgtttacaatgtagaaacaaaggaaaaagctgatgacactatcgagaaattgctaaaacaaatttacacctccttctcaatctcaaacgaagacaattattttgtgagaacaaagaaagtgagattgaaactcacctcagaacaaaagaaggtctttgaaagatttttcttcaattctaaccatgcttataatgaagcatgtctccttcatttcatgttagagcaaaacaagggaaaaacactccttaccaccacagaagacgattactttaaaattttgaagaatccccaaaccaacctgagattccaacaaactagatggctatgggatcaagagttgaaacattgtccagcagatattaaattgaacgctgtgaaagactttgtcaaggctgagaaaattactagatataaaaacaagcaagcagcagaaaaggaatccaaagaggctgctcgaaaggccaaaaaccaatttcttaaaaaggttcaaaaaggaaagaaggagatgattactgatgaggaattgaacgaaagatttaatcccaaacattttactcgacaacctcgtgaattcgaaatgaaaggacgaagcaatcaacatccatatcaatcgttcaaggtgacaaacatttcattatcacaggaaggagtgttgttaaaacctaccttttttaaagggaatgaaagtgcatgtccttccaagaaatctacggatcatcttttgaaattttattatcctgcaagagcacgaaagtggttaaaggaagagattggtatgtatatatatgtatttcgattttacttacatgcatgtgatttgaatctcttacatgaatgtgactgattcatgtaattggaacttttttgaattctaatttttccatgattgcccaaacaagacaacaaaaaattttcacacgagacaacctttgtacgagaaagaggaagatattttgtttgccttccagtccgttatcacaaagctttaactcgacaagaattccaacggtttgataaaagcttctacgagtccaattcgaacagtggaattgaatatgacaagatatttctcaaggactgcccacaaccttctcaaaatgaactcagaaaggaatacattgcattggatccaggtgttcgatgcttcatgtatggttatgatagtaatggagacgcgttggagtttgccgctcaaggagaaaacaccatactcttttccctttctctaaagcaagatcagctcaggtcggaaattgccaagaacaaatttctaaaatacaattctcggcaggaacgaaaattttataagggtttaagaaaagccttaaaaaagaagattagaaggctggaaagcaaaattagaaataaggtgaatgatatgcataacaaaatcattgactatttaactttccactattctgaaattataatacctgaatttaatgtcaaggccatgattgctagaaaacaaaaacaaaggaagcgtcaaggaaaagaagataccacgtgtcaaggacaagaaggttatactaatggccaaacggagaatatggatgtgcgaacagaacctcttgttgcatcgtcttcaccattcgaaggatgggaatcaagggacaccaccacaagtgaaaccaccaccaacacctccgaatgggttggaagaaaaattactagaaaaactgttcgccaaatgttgcgatttagacactatgattttcgaatgaaactcttgcaaaaggcagaaatgcgtggatgcaaggtacatgttgtcacagaacaatatacatcgaaaacgtgtggaaattgttcagtgatcaaggaagacctttatggaagcaaatggtttcattgcaatcattgtcacttccacatccctcgtgacggtaatggagcaagaaatattttgatcaagaattaccatcatttattacattggtaagttgaagagacaactaaaatgattcatcattcgggccatagatctatataataataactatgtgattatcattctgtcaagatgataattccgtctctcgtgtgagagatgagtatgtgatcggagcactttaaaacaccaaaaaatcattgttgtcattgatggagtatggtgtgctctccgagtaagtgttgttgttgttgttcattatttttaacgtgtgtgactttttaattttgtaaagacctgtaatttttgttctgaggttatcagaattgagagaaaggcatccccaatggatctaatgaatgagacgtctcttgtgtgatcccaatgtttttccatttcttgaattggattttgaaaatattcctccaaaaagtaacaaaccaaaccattgccaaatgaaaaataatcccacaattaatacaaacacaatttcaacaccactttgaaatctcattttggaagcgattgcgttttgtcgagatctcaaactggtccaagtttgatgagaagtgtcagagccgtgatgttgaaaagctgacgacacttgaaggatggaattttcatgttttcttgcctgttgttcttgaacttgtcttaatagagaaagccagtagaaaaagtagaattgtttgcatcgcttgggatggtctgtatggaatcgtttcattttcaagtcaatatcgagaagagtttcgtccagcaatgctttcttttgtgaatctacagaaatgttggatgtgaaatttgacagggaagaaggattatgtacaaaagcagaattcgattctgtaggttgttgaagttgagaactatttctaaagacttttccatttttgtgagtggaattggtaatttcatgaaattcttttcgtttcaagtgaaaactcaatcgaatgactctttctctccagaattgagtcgactctgttactacttcataccattctcgacatgtgagtaaaacactgaaaatgtttgcacgagcaaaagcagacaagaaatcttcttcacacaagaaggaagtattggttgtggctgtggttgcagtagtgaaaccattcttgttggagactccacctttctgaaataaatagctaaaaatgttttcgagaatttcacgaggcaattccttaatatggtgtcgctgaggacttgaattggtttgttgacagttgtcagatttgctgttgcttctggagaaattgtgaggagagaggtacaaagattcagaagaggtgtttgaatgggaggtacttttgagtatcaacagtcgattcataacaagagttaaaccatcgaataattgctgaagttttcgaggagtgacagcatgtaaaagttttgacaagtgactgtcatctccaccagagtagtgtgccacttgatgataataatagttgagtaaatatcttccattttcatcccattcatgaatcaattgttcttttgcttccttcaacaattctttaagcttcctcaataaattaccaaatttagagaaaccacttctcaacatttcttcactttcttcaacgacactaccacatggatcatctctgaatattctctcaatccttctcctttccataccaactcctcttctcccacgttcttcttcatatggtcgttgatctgaattctcaataaactcgtcactctcctccatttcgtttccattcatggatgattcctcctgatcagagtccaacaccaattcttcttctaaactttcagtttcaatcgaaaaggtttgactttcacataacgacgatggtgatcgatacatgtaagaatcatctccagccatgacatctccttgtgcatcgtttaccaattcatgttcgataaggatgtttttgaatcttgtttgattatttgaatgattatttgtttggttgttattgttgttaagatttaattgttgttgtaataacaactctccaagaagatgaaatgaaggagg

SEQ ID NO: 4861 - DNA, 4800 bp, Naegleria lovaniensis
  source 1..4800: mol_type = other DNA
taccgttaagacaagcacaaccatcatcgaacaagtccaatgtatcaacgactccaggagaaccttattcacagtcggaagaggatttaattgtgacatccttgcggaagggaatgaatttggaacaaatttaccgagattactttacacaccgaacatttcagtcgctgaaaaataaggttcgacggttaagaaaaaggcaactctatcacaaacagcaaccaatgaagaagagattgaataagagaaggatggttcctaattccactgcttcgactgattcaaaggagttaagaaaaccgttttggcatgatgatacggttgatcgttggaacaagatttgtcctgtgtcatgttttgccaagaatggtttgaaaataccgacccaaagttggtttaccctctccattcgccaacgatgtccatccacaaaaccacctccgagcaagaaggaattggtagaaaaagtgtggagcaaatcagaaacttggaaaaagacgccatgtaagtgtggaaattccaagtttaaaaggacagtctgctcgttcaacggacgcaagtttgggtcagaaaagaagaagcttgttcaggaattcaagcaagtatctgcgttggaggagtctttaacaatgcttcaagagaacggagtgaattcatccacgactgctgagaatgaagtgaattcatctacgattgctgtgaacgaagtgagttcatctacgactgctgtgaacgaagtgaattcatccactactgcagagaatgaagtgaattcatctacgattgctgagaatggagtcaattcatccactactgctgagaatgaagtgaattcatctacgattgctgagaatggagtgagtttatctatgactgctgagaatggagtcaattcatccactactgcggaatcaaaggaaaaagctgatgacactatcgagaaattgctaaaacaaatttacacctccttctcaatctcaaacgaagacaattattttgtgagaacaaagaaagtgagattgaaactcacctcagaacaaaagaaggtctttgaaagatttttcttcaattctaaccatgcttataatgaagcatgtctccttcatttcatgttagagcaaaacaagggaaaaacactccttaccaccacagaagacgattactttaaaattttgaagaatccccaaaccaacctgagattcaaacaaactaggtggctatgggatcaagagttgaaacattgtccagcagatattaaattgaacgctgtgaaggattttgtcaaggctgagaaaattactagacataacaataagcaagcagcagaaaaggaatccaaagaggctgctcgaaaggccaaaaacaaattttttaaagatgttcaaaaaggaaagaaggagatgattactgatgaggaaatgaacgaaagatttaatcccaaacattttactcgacaacctcgtgaattcgaaatgaaaggacgaagcaatcaacatccatatcagtcgttcaaggtgacaaacatttcattatcacaggaaggagtgttgttaaaacctaccttttttaaagggaatgaaagtgcatgtccttccaagaaatctaaggatcatcttttgaaattttattatcctgcaagagcacgaaagtggttaaaggaagagattggtatgtatttcgattttacttacatgtgatttgaatctcttacatgaatgtgattgattcatgtgattggaacttttctgaattctaatttttccatgattgcctgcccaaacaacaagacaacaaaaatttttcacacgagacaacctttgcacgagaaagaggaagatattttgtttgccttccagtccgttatcacaaagctttaactcgacaagaataccaacggtttgataaaagcttttacgagtccaattcgaacagtggaattgaatatgacaggatatttctcaaggactgcccacaaccttctcaaaatgaactcagaaaggaatacattgcattggatccaggtgttcgatgtttcatgtatggttatgatagtaatggagacgcattggagtttgccgctcaaggagaaaacaccatactcttttccctttctctaaagcaagatcagctcaggtcggaaattgccaagaacaaatttctaaaatacaattctcggcaggaacgaaaattttataagggtttaagaaaagccctaaaaaagaagattagaaggctggaaagcaaaattagaaataaggtgaatgatatgcataacaaaattattgactatttaactttccactattctgaaattataatacctgaatttaatgtcaaggccatgattgctagaaaacaaaaacaaaggaagcgtcaaggaaaagaagataccacgtgtcaaggacaagaaggttatactaatggccaaacggagaatatggatgtgcgaacagaacctcttgttgcatcgtcttcaccattcgaaggatgggaatcaagggacaccaccacaagtgaaaccaccaccaacacttccgaatgggttggaagaaaaattactagaaaaactgttcgccaaatgttgcgattccgacactatgattttcgaatgaaactcttgcaaaaggcagaaatgcgtggatgcaaggtacatgttgtcacagaacaatatacatcgaaaacgtgtggaaattgttcagtgatcaaggaagacctttatggaagcaaatggtttcattgcaatcattgtcacttccacatccctcgtgacggtaatggagcaagaaatattttgatcaagaattaccatcatttattacattggtaagttgaagagacaactaaaatgattcatcattcgggccatagatctatataataataactatgtgattatcattctgtcaagatgataattccgtctctcgtgtgagagatgagtatgtgatcggagcactttaaaacaccaaaaaatcattgttatcattgatggagtatggtgtgctctccgagagtaagttgttgttgttgttgttcattatttttaacgtgtgtgactttttaattttgtaaagaaataattttcttgtaatttgaacccgcacggaatagaagcaagcttatgaatcaaatattaatgaaacacagaattaacttttaatatcagtaattttaattacacacatgtgaaaaaatcacatttagaatcttggtacatttccaaaaaatacatttaaaatccttctgctaattcaaagtcataattttgagcatgtgtcaaagtggaagcctttgctgctgcagctgccttcatcttgaatgctaccactccaatcacacccgcagctgctgcagccactcctcccacaaccacgagtggaacaattacggcagcagcaatgactcctccattaccatcatctgtctttttatcggtcactgtgggaacgctttcaatgagtaaggaatttgaagaggtcgtcttggcagaaattttcacacttgtcgagctatcggtaagttcaacgtatgctgttaaggtaccattggtatcgtaggatggaactagaaattctaatttggaggtcgagaggtccttgttgagagttgtgactagattgccattcaattcaaaggtaaatttggcactcaccgttcgaccagaataataggtagagaattgaccatcattgatgcttaattgaatggaagcttgggaattttgaacttgtcctttggttgtgttaaattgtaaggaaatagatgaaaggtacaataattgacaattcgatccaacatatccagaagtacatgaacattgatcgctatccacacattttccatttccagaacaaacattcgaggatgaattaagtacttcataacatttgtgtaattgacattccaaaccatcatatttcgaaggacacacacaagtattgttcaaaatacaagtacctcgactggaacatgcgtctgaagaggttcgtccataacaaattggagtcgagcaatcggaaccagtccatcctgaatgacatgaacaatctcctggagtgttacaggtaccatttccataattacacacttgtgacgtgttggctaattgtccagcacacattggcacttgacaattagttccataccatccagtggtgcatgaacaaacatctggagagctacaattaccatgacctgagcaaactgtggaagtttcattggaaggaatgccataacattttggatattgacaattagatcctacatagttggaggaacatcgacacacattgacatcatcacacgatccatgtccgctacaaacagttgaagactcatttgccaaaatgctactacacttggctaattcacaccaactacctccaaaatcattgttacaggcacaaatattgacatcgatacatgaaccccttccgctacaaactgaagtttcgttttgcaaggttccattacattttggaagattacagaattggcctccccaaccagctgaacacacacagaagtctactccttgacaggttccgtgtgcatgacatacagtagatgtttcattggatgaagtaccattgcattttggatattcacaatttggtccagcataatttgaaagacatcgacacacattgacatcatcacaaaaaccatgaccactgcaaacagttgctgtctcgttttgtaaaattccataacattttggatattcacaatttggtcctccccaatttgtggagcaagcacaatcattcactccttggcatataccatgtccagagcaca

SEQ ID NO: 4862 - protein, 410 aa, Naegleria lovaniensis
MSKREHEEAFSEVFFDFYDDRLDEEKRKIRKMNSSWNDHEDREMNDHHTTTAAIVVIIIDFENTLLQNHHESTCYGVDQAPSEFYSLQELSSKLKRKLRNESMHRAQPFSMKFEYVESLRSIGFIQPVDIKISYVYSYIIASEGFSREILFFDLKSKRLHTKLFLFSKYLCVEENNEESVLLFGCEQTNDVFKFDLQKVATTNQNSSVDHNDFVWKSNCTEMPGSIQVLKTQVFVASYEKKYIDILELSTGTLIQRCHLEYTPRFIQFIPLRLYEHPYLIIIEHKILPRISLFQYCTSEQKWKRERSLGTFGSLDTGEFFSPTRVLYDRAYKHLIVSCKAVEGLCILSLDGKVCKITCELGLTFKIVKSFEQGLCPSRERFETPDGICLNEWTGELFVCDVVYRRVQIYK

SEQ ID NO: 4863 - DNA, 4800 bp, Naegleria lovaniensis
  source 1..4800: mol_type = other DNA
tgattatgaaaattggtcaattaagtccatccaaacccttaccattaagacaagcacaaccatcatcgaacaagtccaatgtatcaacgactccaggagaaccttattcacagtcggaagaggatttaattgtgacatccttgcggaagggaatgaatttggaacaaatttaccgagattactttaaacaccgaacatttcagtcgctgaaaaataaggttcgacggttaagaaaaaggcaactctatcacaaacaacaaccatcgaagaagagattgaataaaagaaggatggttcccaattccactgtttcaactgattcaaaggagttaagaaaaccgttttggcatgatgatacggttgatcgtttgaacaagatttgtcccgtgtcatgttttgccaagaatggtttgaaaataccgacccaaagttagtttaccctctccgttcgccaacgatgtccatccacagaaccacctccgagcaagaaggaattggtagaaaaagtgtggagtaaatcagaaacttggaaaaagacgccatgtaagtgtggaaattccaagtttaaaaggacagtctgctcgttcaacggacgcaagttcgggtcagaaaagaagaagcttgttcaggaattcaaggaagtatctgcgttggaggagtctttaacaatgcttcaagagaacggagtgaattcatccacgactgctgagaatgaagtgagttcatctgcgactactgtgaacgaagtgaattcatccactactgcagagaatgaagtgaattcatctacgattgctgagaatggagtgagttcatccactactgctgagaatggagtgagttcatctatgactgctgagaatggagtcaattcatccactactgcggaatcaaaggaaaaagctgatgacactatcgagaaattgctaaaacaaatttacacctccttctcaatctcaaacgaagacaattattttgtgagaacaaagaaagtgagattgaaactcacctcagaacaaaagaaggtctttgaaagatttttcttcaattctaaccatacttataacgaagcatgtctccttcatttcatgttagagcaaaacaagggaaaaacactccttaccaccacagaagacgattactttaaaattttgaagaatccccaaaccaacctgagattcaaacaaactaggtggctatgggatcaagagttgaaacattgtccagcagatattaaattgaacgctgtgaaggattttgtcaaggctgagaaaattactagatataaaaacaagcaagcagcagaaaaggaatccaaagaggctgctcgaaaggccaaatccaaatttcttaaaaaggttcaaaaaggaaagaaggagatgattactgatgaggaattgaacgaaagatttaatcccaagcattttactcgacaacctcgtgaattcgaaatgaaaggacgaagcaatcaacatccatatcagtcgttcaaggtgacaaacatttcattatcacaggaaggagtgttgttaaaacctaccttttttaaagggaatgaaagtgcatgtccttccaagaaatctacggatcatcttttgaaattttattatcctgcaagagcacgaaagtggttaaaggaagagattggtatgtatatatatgtatttcgattttacttacatgtgatttgaatctcttacatgaatgtgattgatttatgtgattggaacttttctgaattctaatttttccatgatccgtctgcccatcgcctacccaaacatcaagacaacaaaaaattttcacacgagacaacctttgtaagagaaagaggaagatattttgtttgccttccagtccgttatcacaaagctttaactcgacaagaattccaacggtttgataaaagcttttacgagtccaattcgaacagtggaactgaatatgacacgaaatttctcaaggactgcccacaaccttctcaagatgaactcagaaaggaatacattgcattggatccaggtgttcgatgcttcatgtatggttatgatagtaatggagacgcgttggagtttgccgctcaaggagaaaacaccatactcttttccctttctctaaagcaagatcagctcaggtcggaaattgccaagaacaaatttctaaaatacaattctcggcaggaacgaaaattttataagggtttaagaaaagccttaaaaaagaagattagaagactggaaagcaaaattagaaataaggtgaatgatatgcataacaaaattattgactatttaactttccactattctgaaattataatacctgaatttaatgtcaaggccatgattgctagaaaacaaaaacaaaggaagcgtcaaggaaaagaagataccacgtgtcaaggacaagaaggttatactaatggccaaacggagaatatggatgtgcgaacagaacctcttgttgcatcgtcttcaccattcgaaggatgggaatcaagggacaccactacaagtgaaaccaccaccaacacttccgaatgggttggaagaaaaattactagaaaaactgttcgccaaatgttgcgatttagacactatgattttcgaatgaaactcttgcaaaaggcagaaatgcgtggatgcaaggtacatgttgtcacagaacaatatacatcgaaaacgtgtggaaattgttcagtgatcaaggaagacctttatggaagcaaatggtttcattgcaatcattgtcacttccacatccctcgtgacggtaatggagcaagaaatattttgatcaagaattaccatcatttattacattggtaagttgaagagacaactaaaatgattcatcattcgggccatagatctatataataataactatgtgattatcattctgtcaagatgataattccgtctctcgtgtgagagatgagtatgtgatcggagcactttaaaacaccaaaaaatcattgttatcattgatggagtatggtgtgctctccgagagtaagttgttgttgttgttgttgttcattatttttaacgcgtgtgactttttaattttgtaaagatttttcacgctcagtgctattttctgaatttcgtaaagatttggttcatcttcttttaaaataaattggtattagtttgtaattgcaataagctactacttgtatatttgcactcgtctgtagacaacgtcacaaacaaataactctcctgtccactcattcaagcatattccatctggcgtttcgaaacgttctcgtgatgggcataacccttgttcgaatgatttcacaatcttaaaggttaatcccaattcacaagtaattttacaaacctttccatccaaagataaaatacacagtccttctactgctttgcatgaaacgattaaatgtttgtaggctctgtcataaagaacacgagtcggcgaaaagaattcacccgtatcgagcgacccaaacgttcccaacgatcgttctctcttccatttctgttcagatgtgcaatattgaaacaaagaaatgcgtggtaatattttgtgctcgataatgatcaaatacgggtgctcatagagtcgcagtggtataaattgaatgaaccgtggtgtgtattccaagtgacatctttgaatcagagttccagtgcttaattccaaaatgtcaatatactttttttcatacgatgccacaaatacttgtgttttgagaacttgaatagatccaggcatctcggtacagttggatttccaaacaaaatcattatgatctacggaggaattttgattggttgtcgccaccttttgcaaatcaaatttgaaaacatcattcgtttgctcacaaccaaataacaatactgattcttcattgttctcctccacgcataaatactttgaaaataaaaacaacttggtatgcaatcgtttagatttcaaatcaaaaaacagaatttcacgagaaaacccttctgacgcaataatatacgaatatacgtatgagattttgatatccacaggttgtataaaaccaatcgaccgtaacgattccacatattcaaatttcattgaaaatggttgagcccgatgcatactttcattccgtaattttcttttcaatttagagcttaattcttgcaaggaataaaattcagatggtgcttgatctactccgtaacaagtactttcatgatggttctgcaataacgtattttcaaaatctataatgatgacgacaatagctgctgtcgtagtatgatgatcgttcatttctcgatcctcatgatcgttccatgaagaattcattttcctaattttacgcttttcctcatctaaacgatcatcataaaaatcaaaaaacacttccgaaaaggcttcttcatgttctcgttttgacattttttttgtgaacccaacttccagaaaattctcaacatgttactttatttacaattttcttcaacagggtcattgatgatcttgttgttctgacgcgtcatcgattactgcttcttcttctgaacaggtgctgtcgtcttcttttgactcgaactcgatggtcctccaatcactgccattggtttttgtttcttgacataaatcttcttcatcaattccttctgactcaaacctgcaccagcagaagcaagaggtccttgaattccaactcgtggtttactcaaactcgattcacctgtagttggttgagattgttgcttgagtgatttcaatgtacgaattcgatacgaatgcaacatgttatcaatacgttgtaaggaattgtatttgatg

SEQ ID NO: 4864 - protein, 360 aa, Naegleria lovaniensis
MKIRIRFVDDFVKAEKITRHKNKQAAEKESKEAARKAKNKFLKDVQKGKKEITDEELNERFNPKHFARQPCEFEMKGRSNQHPYQSFKVKDISLSQEGVLLKPTFFKGNESACPSKKSKDHLLKFYYPTRARKMLKEEIGVRCFMYGYDSNEDALEFAAQEENTILFSLSLKQDQLRSEIAKNKFLKYNSRQERKFYKGLRKALKKKIRRLESKIRNKVNDMHNKIIDYLTFHYSEIIIPEFNVKAMIARKQKQRKRQGKEDTSCQGQEGYTNGQTENMDVRTEPLVASSSPFEGWESRDTTTSETTTNTSEWVGRKITRKTVRQMLRFRHYDCRMKLLQKAEMRGCKVHVITEQYTSKT

SEQ ID NO: 4865 - protein, 294 aa, Naegleria lovaniensis
MTILVSLSDWKASSGKVYGSDAIFLNTEQTYIRDTIMKSSIDIFSSALNITGVGIEKNIVRNLGSIERVSIYDYSTSVVGNHKAPSKLETFQFTNSTALAKTIDYAIGVGNYASIGIALLILLIVQILFWVITSCYATWSMCCCKPSKKDRERRMQDHAKWALDHKKKKRVTTCCRVFLLVLVIFNILAVLKLFNQGLMMYNEVESLAQDVLGFAGNIPTTIDLIEQSVSSLKTNILNKLPSDEKKQSWSTCLSDMISLIPDFSTTTQEVDTLNSYINSHLKTPLTPLKLSISG

SEQ ID NO: 4866 - DNA, 4800 bp, Naegleria lovaniensis
  source 1..4800: mol_type = other DNA
aaattaaacaatagagtatgaatggttggagctttatattcagtatctgaaagcatggcaaaagtgtgacatgctctttcaaattcaccaataacaatataattaatatgttctggtgatgagaagcaacaataatactcatatggtaatcttgtggattgatctttctctttgttgaattgtaagccaacaattaaggcacttaaaaaattattgagagcattcaagaaattttcagcgttcagattggtgttggagccacaatattgtcgagccactccataaaaattctcgatcatatattcttgcagttgaaaaggcaaaaatactctgttgttgggtgatgattgaactctatacattgtcaaacacaaaccgatcattaataacaacaataatggataatgacaatttatctaccttgaagtcgaactataaattgactcatcttcgatgtcagtattgttatgatttgtttctttttctttgaggaagatgcgagcgattccacaaagctcttttgttatgaacatttgtttgacatcatcttcattcataatcttgtttttacgtgaaatctttggtttggattatcattttcgggttgcattcgaaaagaaatcactgctttgatgatggattttggaagtgcaaatgacatgatctcttcatcatcaaataaaagactttagaacaagctatctgatagcattttcttcaaaaatacgaattactgaattgatgtctgatggtgtgaattttatatcggtaagatagtcatagagaagatgaagatcagaattcgtttcgtggatgtatgttgatgtggttgtttagctccacatttgaattcatttcggtcaaggataacatgccaaagcttgttcggaattgttgttgttttgcatttttattgttaaaaattttattcgttttaaagccaaaaacaaccgccaaaatccatacacatccggattctggaggattctggatttccacaaagtttgggaagtcagcaggagctggcagccgtccttttcggctgtttgctgcaggtttgaaagggccctcgaacaaatttaccgagattactttaaacaccgaacatttcagtcgctgaaaaataaggttcaacggttaagaaaaaggcaactctatcacaaacagcaaccaacaaagaagaggttgaataagagaaaaatggttctcaattccactgtttcaactgtttcaaaggagttaagaaaaccgtttgttcttatgtcgagtaattttctcagccttgacagcagatattaaattgaacgcaggactttgttaaggctgagaaaattactcgacataagaacaaacaagcagcagaaaaggaatccaaagaggctgcccgaaaggccaaaaacaaatttcttaaagatgttcaaaaaggaaagaaggaaattactgatgaggaattgaacgaaagatttaatcccaagcattttgctcgacaaccatgtgaattcgaaatgaaaggacgaagcaatcaacatccatatcagtcgttcaaggtgaaagacatttcattatcacaggaaggagtgttgttaaaacctaccttttttaaaggaaatgaaagtgcatgtccttccaagaaatctaaggatcatcttttgaaattttattatcctacaagagcacgaaagatgttaaaggaagagattggtatgtatatatatgtatttcgattttacttacatgcatgtgatttgaatctcttatatgaatgtgattgattcatgtgattggaacttttctgaattctaatttttccatgattgcccaaacaagacaacaaaaaattttcacacgagacaacctttgtacgagaaagaggaagatattttgtttgccttccagtccgttatcacaaagctttaactcgacaagaattccaacggtttgaatatgacacgatatttctcaaggactgcccataaccttctcaaaatgaactcagaaaggaatacattacattggatccaggtgttcgatgcttcatgtatggttatgatagtaatgaagacgcgttggagtttgccgctcaagaagaaaacactatactcttttccctctctctaaagcaagatcagctcaggtcggaaattgccaagaacaaatttctaaaatacaattctcggcaggaacgaaaattttataagggtttaagaaaagccttaaaaaagaagattagaagactggaaagcaaaattagaaataaggtgaatgatatgcataacaaaatcattgactatttaacattccactattctgaaattataatacctgaatttaatgtcaaggctatgattgctagaaaacaaaaacaaaggaagcgtcaaggaaaagaggatacttcgtgtcaaggacaagaaggttatactaatggccaaacggagaatatggatgtgcgaacagaacctcttgttgcatcgtcttcaccattcgaaggatgggaatcaagggacaccaccacaagtgaaaccaccaccaacacttccgaatgggttggaagaaaaattactagaaaaactgttcgccaaatgttgcgatttagacactatgattgtcgaatgaaactcttgcaaaaggcagaaatgcgtggatgcaaggtacatgttatcacagaacaatatacatcgaaaacgtgaggaaattgttcagtgatcaaggaagacctttatggaagcaaatggtttcattgtaatcattgtcacttccacatccctcgtgacggtaatggagcaagaaatattttgatcaagaattaccatcatttattacattggtaagttgaagagacaactaaaatgattcatcattcgggccatagatctatataataataacaatgtgattatcattctgtcaagatgataattccgtctctcgtgtgagagatgagtatgtgatcggagcactttaaaacaccaaaaaatcattgttatcattgatggagtatggtgtgctctccgagagtaagttgttgttgttgttcattatttttaacgcgtgtgactttttaattttgtaaagagctttgtttccaattcaaaaaaactctgcctcatgatcctagcttactaacgttaatcgtcagccttaatctcactcttccaatttactatagctaatattgcgtacgagctaagaacggttttgtttgcgtaatatcattctctcccgaatacttaagcataacattttcaagaatgaaaactcaccatcattgcaacggatccaatcaaaggaggagctcattctttcatattacaatcataataataatgaccattctggtctctctttcagactggaaagctagcagcggtaaagtttatggttcggacgccattttcctcaataccgagcaaacatacattcgagataccatcatgaaatcctctattgatatattctcatcagcgttgaatattaccggggttggtattgagaagaacattgttcggaatcttggttccattgagcgagtatcaatttacgactactccacctcagtggttggaaatcacaaagctccctcgaaattagagacgtttcaattcaccaacagcacagctttagcaaaaacaatagactatgccattggtgttggaaactatgcttctatcggaatcgctttgcttattttactaattgtacaaattttgttttgggtgataacatcttgttatgcaacatggtccatgtgttgctgtaaacccagtaaaaaagatagggagcgcagaatgcaagatcacgcgaaatgggccttggaccataagaagaaaaaacgagtgaccacatgctgtcgagtgtttttattagtcttagtgatttttaacattttggctgtactgtaagtaattctctatctcctttggtggttattcacagttcaaaagtgtatggtttttgtttgcatttcagaccaatattctgttcagcaagctgtttaatcaaggtttaatgatgtacaatgaggtggagtctcttgcacaagatgtgttggggtttgcaggaaatataccaactaccattgatctaattgaacaaagcgtcagtagtttaaaaacaaacattttgaacaagctacccagcgatgaaaaaaagcaatcatggtccacctgcctttcagacatgatatctttgattcctgatttttccacaacaacacaagaggtggacacactcaactcgtacattaattcacacctcaaaactcctctcacccctctcaagctgtccatctcggggtaaaatcttctatactggccatttccgatactgatattccagaactgctcaacagactctcgagcgctgagtcggtcatgacatctgtgaactttgatcccttacttacatcgatgacctcgtcacaaacaactctccaacagattagctacattgcttcaattaagaattctttacaaatcatttcacaagaaagatcgagtacattgacagataccttcctttcaactcttgcctacaatctacaaaactacaacaccgaccccaacgttgccactcaaactttggcctcacaactctctaccatgtcaacatctttgtcacgcatcaaagatagtaatttcaatcaagcgttagattatttaaatatgttgaacacttctctcagctttgtaaccgcctccaattcgttaattgctgttatcaatggtttagaaagtgctttgagtgtactcgattcgcctcttagcagttcagttgctcgtattgaccttctcgataattctc

SEQ ID NO: 4867 - DNA, 4212 bp, Naegleria lovaniensis
  source 1..4212: mol_type = other DNA
ccattcattgcttctgatgacaacttgtgatgaaccatagtttcataaagagtctgtgttaactgaaaatcttcctctgttttcgaacagaccttctggtatacaattgacaaaatttcaacatgctctgtatcggcacctaaacatcgatccgaccagaaatcagcttcgtagtgggtgtgagaactcttatttacagtttgcattttctattcgtacatacaaattaatatatcaaaatgatttcaattaagaatgcaaatgcttacctttggcttccattgttgtggaagataaattaccaagtttcggctcactgaatgtttagtccaatccttaatatgttcatgaacatcggactgagtattgacctcattgggcaagcttgtagaaacagcatgactattaatcttattggtggcattccactgagaaagctcaattcgttcagggcaatgagactcttcaagaaaccgagcagcagcaaaatgctcatctctttcaattcgtacaagcacttctaaatatccaacaattttttcttcctctgactgtaacgaaaagcttgcgttattgtgatttgaactgttattactgtttggagaggtattgttctgctcggcatcatcagaatcgtcatgagcatctaaatcggattggcttgaagagacagacgacaatccatttttacccttcttcgaagaacaaatggttctcatattcactttcactgttttgtcattattgatcgcttgcaaatcgtcaccatcgattaataacgatccttcagcaagttttttctatttgtgagtgaacgaaaagtaaaattgtacagctctaggcaataattgatggaaatcataaaaacttacatccttccttattgatctggcctccatgagagtaaaccaaaatctgacctgatgcatggtcaactcaatttctggaaattcaaaatcttgattccattgatagagaaattctgtaaaggcgtcaccttcttgttcgtcctcaatttgagaatgagagactgcacttgtcatggcctcaatatcttcgagattttcttgactgttcgctgcagacaaggctgaaacatttgaatcatgatcgaccattgtagcatgctcctcaccttgaaataacgacgaatttccattctcattcaaatcctcaccaaagtttttcattaaaaacgtgccacgacttttaactcgtttcattgtattcttttttgtgcattctcccttttgagagctacttcctgcttgttgtatcatgacataggttttcctatgatctaatcgttccaagcaacccagagaaggtgaaggatgaagctgtggttgagaggtaacatgaggcatttccgatgacgatacaacatgagagatgttctcatgttgcaacggatgatgggagttgagagttgtagtgttgttcatatgattgccattgttattgacattggttcgaggtgaggctggtgtgtcagcagccactagtaattcatcgagcttggcaatgaaatgtcctctcacgactctgattttaatacgatctcctttcgtgaacaccatgatctcgttgttatttcatcaatgaggtggtggtcgtttccgaaacggtttttttttctttaaagttctgttgatggttgatggccacgaatcagtgctcccgtgaacgaaaccaaacgagctcgtgttgttgaggagaaagatgaaacactccaaaagaacactacagaatgaattcaaacacctcgtgtttctgcaacaagttaaagggttgaatcactttttttttgtgtttattttgcattaaatatgttggcggatgaatggactttttcgcagtcgctgaaatgggaagaattggttcattgtgcgcataacagggtggtgctctttttttaccttaaaaaacggcgaaacccgaaggcatctacagttgctcaagtagcttgaaaatcacggagcctgtgtttacaatattgtgaaatgttgcgatttagacactatgattttcgaatgaaactcttgcaaaaggcagaaatgcgtggatgcaaggtacatgttgtcacagaacaatacacatcgaaaacgtgtggaaaatgttcaatgatcaaggaagacctttctggaagcaaatggtttcattgcaatcattgtcacttccacatccctcgtgacggtaatggagcaagaaataattaccatcatttattacactggtaagttgaagagacaactaaaatgattcatcattcgggccatagatctatataataataactatgtgattatcattctgtcaagatgataattccgtctctcgtgtgagagatgagtatgtgatcggagcactttaaaacaccaaaaaatcattgttatcattgatggagtatggtgtgctctccgagtaagtgttgttgttgttcattatttttaacgcgtgtgactttttaattttgtaaagattttatcacgggtggccaactccttcagtaaaaatgaccaagatgcgagacaagattcttcgcgagcggacaaggtatttcacctcatttttcaaccccgacgattttcgaaaattgttatcagagatagttaaacacaacaaacaagccttcaataaatctgatttcttgagagtagattctctatgcgttctagttatacatactctttgttggtgaagtaatatgaagtaaaaagtgagaacgagcctttgaaaaaagtgtgcattcgtcagagttaatttaaacacaattctcatcattatcgattacaacttttgcaaaatactaattgttcatacatgtttagatttagatttaccgagaaaacttgtcgatttgaatgagctttggttgaattttacacactcagtttgcatcaaacagcacaggagcaaggcagaaatttttgagttcttcaaaaagaaaaatgggcaggcctaatcgctgttgctgctgttcactcaatgcaaaattaagtactccacaaaatatcacaattttcggagtggattacaagaagcctctactttgcaacacacaccacaaatatattactgaatatattaaaaacaattcaatagatacatcatcacctattactctcgcaattcaacggcaaccaaagggaatcaaagacatcatttcaattgtacctaaaaactttggccaatgtaaacactccgacgacaagcggtgtagcaactgtaaaaagggtaacatgttatgtaatggtattcatttcgaaaaagtgagccatttattaacagtatcgggaatcatatcacacaatggccacagcttcggaagtgtgaacttcaatcatcatggcgaattttgtttttttagtgtagattgcaataattgcaatctcaacaaatatggagtttgtgaaaaatgttatgaatgctatgaaacaaaattacgccattatcagcgaacaattgaaaaccaaaacagctcacctcgctgcaagaacacaagaatacaaaaatgtcatcaaatcattgaaggcaaaaatctctcgacgagatactacaattaagaatttcgaagaattaattgaagaaaaagatcaaaaacattatttggtagaacttctctcgattgcgctagaggaaggaaaattacatgaaacccagttcttttatcaattattagaaaatactttgcaaaatttggtttcgtcgaaaaatgttaacggttttcgatacaaagagtgtatcattcattggtgtttattacttcgattttatggtggttctcgtttgtggaatattttgaaaggaaattctctcggtgaaactataacatctgaaaacgcattagataagcttaatctattacttccatctatttcaacaattaagagctatcttccagacttgtcttttggtaaccttgtcgacagtgatttgaaagatattgttaaagccatggcattgaataatattagtaataagatcataatttcatatgatgaaatagagattagaggaggattatgtgtgatgaaaagtactggaaaagtaattggattcacaaattgcaatgaaaagtcttttgaagatatatataacgcaaaaagagaaattacaccagacgatattgctagtcatgtgtgccagttttttgcaacaactcttgacggtgagatgtcttttcctatttgttttggtggtcacaaatca

SEQ ID NO: 4868 - protein, 319 aa, Naegleria lovaniensis
MFWLIPVITSVILVVWLFGVRLLSVLDSSNKIIFNGRKRKNVNNSDDCSDARLEENKSIPSTRHCIAITIDDVPWKYSLPKILRRRERQQHTMISSTTQNHDLFISSISEICKILKQHNACATLMMIGNYSIRNLQKNTQLVEKFVEWLDDGVIELANHGMTNSKHASLSKTNLLMEIANCEKAVNDILLAPLNERRKLKRQAPLTSVMTKYYRPGHGFFTQEMVQACQELNYDIVLGNIYSFDPQVPLWWLNFINIALVGYVYDLVKLLSFGFLCSNDHHQIVILHDRPWTAQLLNYLLPFLQWRRYSVLKLSHMMGE

SEQ ID NO: 4869 - DNA, 4153 bp, Naegleria lovaniensis
  source 1..4153: mol_type = other DNA
atgaaggtaactgttgaggattgttttaaatgccattctaaagttgtgtttccaagttggtagtatattccaaacaacaacccacttacccattcaaagaaacggtttgtgatacaacctccattttgccctctacggtaatgtctggcactgttagagtatcgtatacattctttccttgaagaagataatgatcaatggagtcttgtcgctccttgatctttctcttatgaagagcggtagattcaagaaattgcaacggggattccaatgttcgttgatattcaatgaatgtattcatccattcaatctcttccatttttcgtctcaattcagcctcacgtgtcaacaacgtgctcaatttaagttgcgtaatgtcatgaagcgaagatatggactttctaaacagttctcttatgtgggattccatttgacctgcatttgctaacaactccaaacgtctcttctcaatattttcaaattccaacatgacgagttgacgttgttgaatttgtttagcaatctctggtaatagcagtttctcgtctgagggtgggttacatgactggtccacataatctgacgcctttttgtacgccttactaataattttatcactatttcttagcatgtcattatacatgacttgatttaacattttttcatcacctgcttggtcatgctcgacaaagaggacacaatcagcaaatatttgtcgtgcgtcaaagataatgaattcgtggctgtaattggggtttgcctcgtctggttgagttcacatgaacaacaatgattggcaaaaaacagagtagtgattccaatgtacttacttggttgaatgtaaacactgtcataaccttgtggaatcgtaattacttcctcattgaagtctctattcaagcaaaacgaccttcccgtattcaacagacaatgaagcaatcgatacacccgaggacgagaggtaggttgaccgagaaaggactcttgttgttgcatttgaagcatgtactgttgctgttggatggtattggtgcttccacggcttaaattttgatttgctattaatgaagtatgcatctgttgggtgttgggatcaaggttgattcttccaatactcactctcataccattctctggaatttgaaaaccttcactgatgatactctctaaggtgttattggagcccatatgagatgaatcattcagattgagccatacatcaaggaaacctcccgagctgttcatgctcagttgttgatattgtttaaattgattgtattcggtagcatctcgcaaacagtacactcgtgaaacggaacaagaaactgcaccaatggccaacttgacactatactcaagatgatgaaagaatggatcttgtctcggaatgtgcctcacctttgatgagatttgagattgattcattctctctgcatgatgagtcatcatacctgtattcggattggaatgttgagctgagtttaccgaagatgaagatggaacaacattctgattcgcctgagaacgtggtgaatgaagtgtttcactgtgcggatcatgaaacgaatacaaatcgtctgccgactcttcgttgagaaaccgcaaagtggctgaggctgtttgagatttcatattaaggctttgatgatgatgttgcaatacttgctgggtcataccttgttgatttgagtttgcttgagaatttaaaattggtgattgccgatgatgaattgggggcgaagaaaatacttgatgatcggcaacaggatgttgcatctgttgtgggctcattcttcctctctgcgaggaataagatgatccttgctgaactctttgtaagtaaggatgattaaggctcatttggggggatgacgagcttctattcattgaattcacaacgtttggactggacgagtgtggtgcttggttattgtacattttttcgctatttattaaaaatgccgttagctttgaattttcttagtgccttttatacaatgtcaatgaagccatatcattgtccatcttgtggcttgattattgacaaagatagatagatatcagtgaagcaagaaatattctccttcaattctttactgctcatagaattagtttttgagcaactttaacatggctttcactcattgagtgttttacgcaattttgtacaaaatttttgttgtttatttttctgcgaaaaaaaatgttttggttaatccctgtcatcacctccgtaatacttgtcgtttggctgtttggtgtaagacttctctcagtattggattcttccaacaagattattttcaatggaaggaagaggaagaacgtaaataacagtgatgattgctcggatgccagattggaagagaataaatccataccttcaacaagacattgtattgctatcactattgatgatgtaccttggaagtattcactgcccaagatactccgtagacgtgaaaggcagcaacacacaatgatttcatcaaccacacaaaatcatgatttgttcatttccagtatttccgaaatttgtaaaatcttgaaacaacacaatgcctgtgccacattgatgatgatcgggaactattccattcggaatttgcagaaaaacactcaactcgttgaaaaatttgtagagtggctcgatgatggtgtcattgaattggcaaatcatggcatgaccaactcaaagcacgcatctctctctaaaactaatctgttgatggaaattgcaaattgtgagaaggctgtgaatgatattctgcttgctccactcaacgagcgaagaaagttgaagaggcaagctccgcttacaagtgtcatgacgaaatattatcgacctgggcatggctttttcacacaagaaatggttcaagcatgccaagagttgaactacgatattgtgttgggcaatatttattcatttgatccgcaagtgcctttgtggtggctcaatttcatcaacattgcacttgtaggttatgtgtatgacttggtgaaattattgtcatttggatttttatgttcgaatgaccatcaccaaattgtcattctgcatgatagaccatggacagcacaacttctcaactacttgctgccttttctccaatggagaagatattcggtcttgaaactgtcacacatgatgggtgagtaaggaaaaagattattcacaaaagatgccacctgaattattttgctcaaagctcaattaactcaatagtggcctacactgttttgaacctttgggctaagtctgccaaattgaccggaaaggtcaccgaacactctcgatttttatcatgattacaatgcacaattgcggtctttctccagaacaggcaggtcattacaagatctgttattctctcgtacaactgtcaaaatggagaatttgaagacagtgtcgttagaacaagcattcgacattgttgccaaattgtatgaatgcactctgaagcggtgattaccacaacgcactctaggtttcatcattcaccagttgtccagataagatgcaggtatttgtgatggtagcattccgtggacatgaaagccacaacaccaaacggaacgacatcctaaaataccccttgccattatccaagcacataatgatcatgatgcgcccattcattattgtcgaggaagtacttttcgcctgcatgcaccctcttcaattatgtcagatctccatagtgggagagtccatcgccacccgtgtagcgcatattatcttggagtgtgcttaattttgtccgtgccttgcattccgacaccaaaggcaactgtcattcttcaacattttcgggtgtttagctcatacaaggtgcgactcgcaaaatattttcaagcgttaaaaattgcttttacaagtcgacaccaaagagaacaacaactaggtgcctctcactacttggcgtcacttcaagctaaagaccattcgctgcaattgtgtggttttattgaatagtagttgatttcaacaattagaacagaaaagtcgttcataccaaacatactccaatagcaagtagaaacaaaatcgttcatgaaatactacatctgactgccgataacatttgtcaagttcaagccaaagaaaatccaacaaccatcctcaagtgaaattttacagagcatttca

SEQ ID NO: 4870 - DNA, 4087 bp, Naegleria lovaniensis
  source 1..4087: mol_type = other DNA
gtgttctcaatattgatcgtacactgcacggaaatattgtggttgaagtgaaccttaccaaatcattttcatcgacacgaaataatcaaaaattctatgacgtgctaaccttcaaggaattgccatccaagaacattttaacatttgcagctgtgaatttgttttacaatttttcctttgaagatcaaattacacagaactacaagttgcaaatgaaacgatggattgaaaaaacagaagagaatgtgaacagtaagttcttgataacatctttcaaacaccagtacaattgttccattgttatgcaattatactgtttaacaattgttttaacgataaaaatatgtattgacatcaatcacatcatcgacttgaagagcaacaaattgaaaccattacagaaattaacacaacgccgaggaaggttcaaacgttcaacgacttcaaacattttatctcaactcataagcaagaatcacatgttttctggatggaatatttgacattcttgagatcaatttatgctcaccaacacttactttctcttacggaattggaaaatctagaaatactgatttttgaaaaattgcgtagcaggtagctacatactgtaaaggtaattggcgggaaaaaatctcgacgtcttactggttgaattcagggcaagctgttcatgattcaaacatctcttaaaaatggaacaaacgctctcgatctatttagtgaaacaaccaccaccccaacaacaacaactcaaatcttcaaggacgaaccaacaacacattcaacaactacgcatgactccttcaacgctggtggtcaaaaagattccagctaaattagaggaggggtgaaagtcaattctcggaaacttgcagatccatcggaaaatcactcatcatttatccttgacaattcgcaaaattatcaaacaaagagtattccatcattatttccgctactttaaaaccaagacaaacgtcagctccaattcaatctacaagaagcattggagattcagaactaggatcattgacaagcaggaaaactagcacctcaaaactcacgaatattacaagctcaaaccagagcggtgaaaagaactcgcatcataatggcacagttgacgtctcgttaaagtactcacaagaagccttgttggaaaacaaactagaattcttattgaacgatgacgatatttattcagctaggcaaagtatcaaagatgcctaccttttcaagtcctatgaacgagatacatctaaatttgccagaaaaatatcactttctcaacttggagttacattagttttcgaaaccaaagaaagcttttacaacttttacaatcgattcaaaacctctagcactgggagcatgagcaatattggtatggaagaaattgaaccgtcagagccgaagcattctgttcttgagtctgacttaccaacaacattggagtgttagagcatacaaacgaggaccctcaattaagtacagaaccgtttattacagaagaagaaaagcttgaaatcgttaatacaatggaaaaggttggagaaccgtaccttgtagaattatttaaaacaaaatataaaacgagagagctgcttcatgttagttcggccaaccgttgaagccaaatgaacaagtacagcaatttctttcaaaaaccatcactaaaacacagtcctgatgacgcaaggtttattacaaactcaacaagtcaatataatcaacaacagtcagttcttgacgaaccattcattcattatttgaatcaaaagtgttgttttggaggtggataaggaattgtcaaggccggacgaaaagaatgaatcaagttattcaaattgatagagtttcaatttgataagtcattcaatactgataaagtttcaactcttgttgaggttttcaaaaaaaaaatcaacaacaaccttaatctcaacgaatgaagagaagtagagaggatgtgttggtcttcccaccttgtgtgcgttggctttcactctttgagtgtttgcttgcaagatcagcactttgttcgatttgtttgttttgttcaaattgttgatttaaataaggcgttaaataatgagcaacaagttgaccaaatagtgatgtcaagacttcaaagactgcaggaaactgatgtagatggtcaaaaggtgggagatgttggtgattagtaaatacttgtgagatttactaagaaggcccaacattttaaagcatatgtggttgagtaatacaggtagttaaatatatttattaaagtactcgccgcttgcggtgtaaattggttcaaacagtcttattgtacaatctcgtcaatcaaacgcattgtctcgttgctcatggtcaaaaatctctgctacataatctttggcatccttttccggtcttgaatctggggtgaatacaacatcgagctctgtagtactttcatctaaactcgactgacctggaagtggctcaaaaaattcgtcttcttgttgaacttcaggtgtggcagaaacctcttggtaaaatgttggaggaggaggattcacaggttgttggtacactggaatatagtgatggtagatattggtatgtgttggaggcacaataggttgtactgcgtgaacagcatgtattggttgtactgtctggacaggaattgcgtggagtgattgaacaggaagaggttgaattggttgaatggtttgaattgtttgaattggttgaacatgttgggtaatgggttgaaggtgttgtataggttggggttgatattggtggactaataattgaggaggtacttcgccttcagccaccacagtttctcgatattctattggagcatgttgatactgaactgatgtaggagctgtttgaaaataaaactcgggatagcctgttccctgttgcactactgtttctgctgtgatgcttctttgttcatcatctattaaggtttggtttgaagcggaattaagaacagattcttcacgagtactctctgacgcagacttcttattctttttcagttggttgtacctgtgtctacattgcagatctgtccgacctttaagaccttgggaaacctttttccaagaactttcacctacttcttgcactctatcaagcaaccgttgatcttcgtctgcagaccatggctgtttacaaatttccgggtttaatactctccaccaatgttggttgcattgatcacttgtcttatttccaacagcttttgcaatactgctccaattttttccgtcatacttgatgtatgcctcgaacaactttttgttttcttcctccgtccatctagcgcatgatcgttttttcttaaccttactgatgttggtacctttcccgtttacagagctgtgcgaattcgatctttttctcgcaggggatgatgaatgaattcgttccaaaagactcggttcttttgtagatgaaaacggtgaaattggagacaaagtttcatggtctgaaagcatgtctctaccgctactcggagatgtagcaacctcgagaggactcgaacattcaggactgttgctcatcgatgacgtgttgttattttgaaccatcatgttggagttagttggagaggtttttgtctgagagctactaaggggagaaacaacggttaattggtttggtgtggaggaaaggtggtgctgatgaatggtgctcactgagctacccaaaacagctgcttgtggtaatgacgtagcttgggaaggcacagagtaaactgatggagtttgatgtgctaatgttacatgttgcggatgagagggtaaggaatgataagcgttttgggaaagaacgggagaaacagttgagtagtgataagaaggagtttgatatgcctcgtaccgaacgatgtggtgattggaagtagggtcgtacatggtggtagtgaatggatgacaggtagttggaacataattatggtaaggataagcttgatgtacataggtcgtggtagggttgtgataaccagaagtatttgggtcttgcatcagtaccagagtttggtatgcttcttctgttccgttgtttggacgatgatgatgaagaataa

SEQ ID NO: 4871 - protein, 251 aa, Naegleria lovaniensis
MNTLWMILTVMTVIALVISFFLKGKAMAARVREFLGTSKQRAVKFMSEFKRKTFHLVGLLVPGIYYFGLKFGFLTKFQACSIVAGFAGFSLTVDLLRLKSERFNKMFQESPAGKIMRKKELNDINGSTYYLIGSLLTMILFHPTIAIASLLFLDLGDLFAALVGISFGRVKVYKSKSLEGCLANFFICMAVGLTIFYHVHLYEYISLIGAITATLTELFLDQINDNLSIPIMSGIALTLAQWRLGVDIPFM

SEQ ID NO: 4872 - DNA, 4102 bp, Naegleria lovaniensis
  source 1..4102: mol_type = other DNA
tacccatgtggtcatgagtgttaggctcattgaaagtgtatcattgtccatcatgttccttactgctcttactgctcgtagaataactttttgagcactttatgcttttcctagctcgcaatcgatgctcgataaagttttgttcaaagagttgagattaactaaaggcataagacatcactcagatactttttcaacttgtttataaagtcattcgtattgaatggtttgtaaataacgtcagcgaagccttgaatgagtattctctgccttgttgtctgcggacaatacagagaatgagctgaaatcacttttaggcgttcgattttgttgcacgctgagggtatatcggaacaacttgaaacgtggtcaacacaaccaatcactcattctccttccaagtaaatctcttgctcaaccttaatacttgcaccatctccatttaaaccaccatcaccgaattcatgtctgttactaaaaacaatacagttctcatttccttgcccttacaactcattacgccataccaacgttaaaaaagcttagtgagaaactgggaactgacaaaaggctgtgaacttaaaaaaccttctcaacagtcatcaacgcaaccaaacaaaattcaaaaaaaatgaacacgctttggatgatcctcacggtgatgaccgtgattgctctcgtcatctccttcttcctgaaaggaaaggccatggcggcaagagtgagagagtttttaggaacatcaaaacaaagagctgtaaagtttatgagtgaattcaagagaaagactttccatttggttggattattggtgcctggtatttattattttggattaaaattcggattcttgaccaagttccaggcttgctcgattgtggctggatttgctgggttttcattgacggttgatgtaagtgtttgcctctcgatgattattttgaaatatggataaattttgaaatgatgacgatgataaccgttatcacgatatcaaaactgccacgatgattcgttctacctttgaaccggtgacttgctctttgtggacatcaacaacgatcattgtttcgaccctatctccgttcgttttatcaacgaaaatacataatatttgttatttacaatgccatatctattcataacaataacgtgaatattaatgcattcttggaatcatcagcttttgagattaaagtctgaaagattcaacaaaatgttccaagaatcacctgccggcaagattatgcgaaagaaagaactcaatgacatcaacggtaggtttttgtgataatttgtctattattataatctaccgtgcgtgggttcttgtatcaaaatgtgtcacacacaaccctacatcatttccggtatttttcaatatcaacaggctcaacgtattatttaattggttcattgttgacaatgattttgttccatccaaccattgctattgcatcactcttgttcttggatttgggagatttgtttgctgcattggtaagtttccactttttaaattttcaagaaaattactgacctatctttttcggtgatttttaggtcggtatctcatttggtagagttaaagtgtacaagagcaaatcattggaaggatgtttggctaatttcttcatttgcatggctgttggtttgaccatcttttatcacgtgcatctctacgaatatatttctctcattggtgctattactgccactttaacagaactcttccttgaccaaattaatgacaacctgtcaattccaattatgagtggtattgctctcactttagctcaatggagattaggcgttgacattccgttcatgtaatttcagattttgttgtgtttcaaagatgaatttgcatcctgtgaatctctaaagtgtacaaattatttcaattttatttctacttacttgaatatacacatttaatttatttttctgcaagatttatttcttcgattccttactactcatagaattagtttttgagcaccttgtgtgttgggtcttcccctggctttcactctttgagtgtttgcttgcaagatcagcactttgtttgttttgttcaaattgttgatttaaataaaggcattcatgagtttgttggcatccgtgcaccaacatttgaattcaactttggaaagtggatggtgttgaaaaacggtgtcgcacaaaaaatggctcaaacaccagcagccgtgaattattctctctttccaagactcatcagctcacatcccaactttctcactccttgtgagggacttgtggctccaacgaattatgtatgctacggagtgaaatatgtccaacaacatgtgttggaacccatcggagagcctgtttatccgtttttcaaaccaatttatgatgtattggatgagaagggaggagccattgggttgaaaccagatcaaacaatttttgtattgatgatgatgtttacttatgttttcagctttatttatagaatgttgtttaatcatcgggccatgaaggaggcaacgtttttaaaaactctatatttggtagctgttggattgttttatgcaatttttacttttggctatgaagggttccatgccattgcttgtagttttattagttatttatgcatgatggtgttacccaagtctatttcctcaaaagttgtatttgtttttgtttggacctatttgtctatggcgtaagtttttgttttacttgagtagactcttccaataacgttattggaaactgttgctgcgttcttcattctatttgaatattgttttgtaaaatagtcactttattcgaatgcaattggactttacaagtcaacgtgtggactacagtgccatgttgatgatgatggttttgagaatttcatcctgttctttcaactttacagacggtcaaaatccaaatgccaaagaagaactcgatgaatctttggttgagtccagcatttccaaagttccatcatttttggaatatattgcattttgcttctattttcctgctcttttggctggaccaccattcgactttaaatatttccaacaatatttaagacatgtaagtgggcaatttgtactaacgccttacgattcattatttgtatttataataacgatcaattttttttgaaattttgtctgtttcaatagtatgatatggatacaattccattccatggaagaggactcatttataacactgttatgattttcattagttttgctggattcactcaaattgacagatttgacagagaatttatcatgaacaatcgggaagcattttcaagcatgcccttgctcaataagattatattcattttgctcatggtagagttctttaaattccgttactttatggtttggcatatttgtcaaggatctggatggcttgcaggatttggttatgatccaaagaagaaagattggtctgctgtgactcaaattgatttctgggcattcgagctcgctacgtccccatatcttttgtctattcactggaatattggtgttcacaagtgggtcaagaagtgtaagtatgaatattttatggcatgggaacgcataatatttgtgtaacacatcgcattgttttttgttgcaattatttcttgattaatagatgtttaccttagaaataagaagaagggaagcagaccaggtactaaggaggtattccaaaccttccttgtcattgcattctggcacggtttttatcctggttattacattttctttgttttagctggtgttggtgttgagtttggaagaagtaagttgtttaatagttactgagctgtttaacccaacacaattatcaacaatataatagtattcagactcatgttcagaaaacgcttcattccagacgattacacctttgatgtttacaagccaattcaatctctgaaaaagatcaatgtcacaattgcgctctacaatattgctgcctatttggcaactcatgctggaaccaattacattgctgcctcatttgtgttgttgagtattgaccactcagtttttatttggaaggaaacttatggagggcccatattttgtggaattgtcctgtactttactttgaagat

SEQ ID NO: 4873 - protein, 309 aa, Naegleria lovaniensis
MPQNLSWRNKLSSSSNLLTHWAVCLEVGIPSELGAKRKIKGIAAVCKVNGYVQRRALETIVHDIETFASVVVRSCVLIVCEANHHRYLNKFLSCIDKEFSMYDLISFDLIERRRDIGFKIITSVDYNPATGSSDDTTSVPSFQLPHQDQISWDIVKAVLDISELMEQVSDYKSVDSQKEEKEIQISKRTRKHEHVPTASTSKLQRQSGTMKIDSFVLDKSDCSEWPEKAISILLTTTKKNGGMGLPNNVITGVELSVVDLENVADALINSKGDHEAKILSGCKLLHTVELFKVQQAIVRWVFTNLLEYR

SEQ ID NO: 4874 - DNA, 4102 bp, Naegleria lovaniensis
  source 1..4102: mol_type = other DNA
aatcatgattgattttggagtgaatcacagacatgaattattcaaagaaaattctgatcttgatcaattacctgcttctctttcactcaaattgttgagagagtttgaaaacttgtaattattagctctgacttctcggctccactaaaaagttaacttgtatatttattatattgaaaatattatatattccatagtgtgaagcaagcaagcaccaactgtgatcaaatcagttgttgattaacttgcctttgaagaaatatctgaacgtttacacctaattgcgtaactacttttccattaaattgaagcatggttttgatgctccatctgtgaatattaaaaccaaaaccttatttcagctgatatttctattgacctcatcacaacttaaaatgccgttggaagttttgagcaataatcaatgaattagaaaaattatgaaaattggaaatggttggaaatggcataatcgttaggataatttttcaaatgttctttgagaatgttttcagacttgattatccattgctttatttccaatcaactgaatggacgattcaaggaaagaaaaagccgcctcaaagtccttaaacctagaacttgctttttgttgctccaattcgtatattcattctattgacacaatattattctggacacactgtgccaaacgttataccttgcaacggaataaatggtaatcttggggaacaagttctggcttgagcttaatacgggatgttagctgaggttttttaagcatcagaagttcctttttcttggctcatccttaatgacgttagtgacattgtcacaataggacattgcatctagtttacctgtattcaagtaaattagtaaagacccatcttacaatcgcttgctgaactttaaataattcgacggtatgtaatagtttgcaaccagataaaatttttgcttcatggtcacctttcgaattaatcaaagcatcggcaacattctccaaatccactacgctaagttcaactccagtaatgacgttatttggtaatcccattcccccatttttcttggtggtggtcaaaagtatcgaaattgctttttctggccattcgctacaatccgatttatctaggacaaatgaatcaattttcatggttccgctttgtctttgcaactttgaggtcgatgcagtcgggacatgttcgtgcttcctagtcctcttggatatttggatttctttttcttctttctgagagtcgacacttttatagtcagatacttgctccattaactctgagatgtcaagaacagctttaacaatatcccatgaaatttgatcttggtgaggtagttgaaaagaaggaacgcttgtagtgtcatcactgctgccagtagcggggttataatccacactagtaatgattttaaatcctatatctcttcttctttcgatcaaatcaaaactaatcaggtcatacatgctgaattccttgtcgatacaagagagaaacttgtttaggtatctatgatgatttgcttcacaaacaattagcacacaagaacgaacaacaacggaagcaaaagtttcaatatcatgaacaatggtctctagtgctcgtctttgtacgtatccattgactttacaaaccgctgctattccttttattttccgttttgcacccaattcggatggtattccaacctccaagcaaacagcccaatgtgtgaggaggttgctactactgctcaatttgtttctccaggacaggttttgaggcattttttaaggcgtggtttttatcaaatactctctgcctctctcctaaaaacgatttgaaaatgcgaagcagcacaaaataaagccacaatttactaccaacaagtcaatataatcaacaggctgtacctagaaaacctttattcattctttgaatcatacaacttcttttggaggtcaatatcattaaatattcttcttcgattccttactactcatagaattagtttttgagcaccttgtgtgcgttgggtctttttcccctggcttccattgagagtttgcttgccagatcagcactttgttggatttgttttgttcaaattgttgatttaaattacccaaagtcgttaaaaggcgggtccattttcatttcgagtaacatcgcattcattcagacaacgctggacggcttccaaaaggtgttcttgctcactaggatcaatggttaaactttaaacattctacttgattttgctaaatcttaaaaagacttcactcagaaccattcggatctcaaaacgagggcttaatatcattttagaaagtatttcatctaattggttccagtaaatacagaacaatttttgagggagagtttgcaaacttctcaaacacattaacacaagaggaattattgcattcactatatatccatcttgtcattaccttgatctcgttctaaataaaacgttaatacttgtttaacagtttgaataaatctgtggaccccaaagcctactatttctgactcggcattgtcttgatataatgaaagtatttgagaaaatattcttaataatgtcagccatacttctgtttcaacattaatcttgttattagatgttgtagtgtattccaaaccttccaaaattgtcacaaacaacggaatatattcatatgattgattttcaaataaaaacgagagtattcgatcaattcctttggttatgtgaataagggactcgacgagattcgtgttttggccattctgttttgacacaatctctgctagtaaatgttgcatctgctgccaatgacggtcttgaaactttccgccacatgttgctaatagtatttggatgttttcagttccaacttcaaaaattttgctgttgcttgaatgttctacggagttggatgtgtagcattgcctaattaacctcaatatggatgaaaatagatcaatagaaaagtctgaagagaaattttggtctagcactgagacaagtactttgaaggcatttctactcgtacaatcaatccaaccattgtcaagaacaccttcgcttccactcgaaagatggtcaaaaattggtagtaatgccccattcaacaccaatttccaagcctctactgagaacctgccaataatggccttatcgtgtaatagggattgtagtgacatcaatgcagcagagcgaatgtcttccctataatcagcactgaccagagatgaaagacatgctaaaattgggatccaatttgtcacgtcttcgcctgccatttccattgttgcaagcgtattggcacagtcttgaatgagagaaatagccttcaaacaggtatccgtgacggaaatgttgttttgaccaaaggccttcaaacaaaataccaaatctacaaagcatgaatttttgagaatccacaacaggtatttacatctgctctcgtgtttgtcgaaaaagcagagcagcctgtcaaaggaagcttgtactatttccatttgtttgcttgttgcagcaaccgaaaatatatgaatccatgatttgcaacctgttgtaatgaaagaagtttttgttaaagctaacgtgactatacattctatggccatcacttgaatttctactgaactactttgctgcacaatgacagtgtacggtctaagcatctcttgttgaaagtccgagagagaaccaatttcaatgagtttgagtatcaattgacgcagagtatccacagcatacatggcaagagtagtgtcctgatgtgttgcaacaccaataaaaaagttactgatgacattccaaattctacaccacaacttatccattcggaacatgttaaggtaacatgtttcaataattttgttaaggcaaaatatatgacgttgagtctcatttgcatgtcctttacattgaagagaacaaagagccttcacatagtgttcaatagacaattcatccatcttttcattgttattactgaatattctgtcaatggtagcttgatcgacatgttgagtgaacaatattgccatgttatcaattccagaaatttgaatgaatatgtcgttgttgatggatgaagagagtattctatccacttgataaaaca

SEQ ID NO: 4875 - DNA, 4083 bp, Naegleria lovaniensis
  source 1..4083: mol_type = other DNA
acagctctttcaactttgatgcgctctctcttggaatatctaatgtggataaccggttgtcattcactgaaagtgtttctagtgagggaagaccgctcaaagatgacaggctttgaaataaattagtatctagaataagggccctcactttaggaaaggccgtaaataaattatgttttgctgaggaaatatcttctcctcgaatattgatgtgtgtgacttgagagttatctttctcaaaaggcattgagttatcgataatgtcctcatccaaaataacatttagctttgctgcttgagctggctttaaatcttgagtcgatcccatggaggaaatgggaggagatttgaggaatttttgtacatgacttttccatgaagttaaccgctccaacactgtccacttgctgtttttcttagaagtttgtagtgcctcagcaatcgtcttaacaataaagtttcgtttgttttcttttgctttggcaagctcttttttcttttcttcgagttgtcgtttaacctcaagctctttctgtagtttcaatgcttcctcttcttttcgccttcgttcttcctcttgacgcttttgctcctcctcctttctcctcctttcttcttccatctttcgtttccgttcttcttcctttttctgtttgtctagctcaatctttcgctttctttcttcagattttttaatattctccagtcgttgccgttctttttcctgcacttccttaattttttgctcttcctttttcttaattataagttctttcagtttagtttgcctttctgcttcttcaagaagctcttgctgttttttttggtttgcaatctcaatttttctctgaatttcttgttgatgttcaaacagctttcgttcttgctcttctaactccttttttcgttgctcttcctctcgtttacgttcttcttcttgttttcttttttcttccaagatttttcgttttttttcttgaagctctttttcaattctttgttcttcttcaatcctcttcatgttttcttcctcaaattttcttttcaatatttctgactgcaataataattcttggaacgcacttttttctttgttcagttttggcttttgagatgatttgaaatggagtgtctctatagaatctctagtgcttgtcgattcagttattcgaggcgattccatcttttccaaagacagtgatttgttaacaactcttggcgtttcaactcgagtaattggcacatgttgtaccttttctttgatctgcgcaatatggtgcatgtatgtttttgatagtgtatttttacctaaataataacctacagctgtaacaatcgaatttttgagctcattcacagtggagagatattcttctacaaaatcatcttgatccaacattttgtggatttcctcaaaatcttcatctataccaaaactagctttatcttcgatggcagtcagaaatacatcaccttcttgaatcaccgttgggacttgtctcttttgtataatgttgtcaaactcttctacataacgatgataatcgtcatcttccgcagagtattctgttcaatttgtcaatgagtttgttgatgaaaacaacaatatacctaccgtctatggaaatgttgtcaccgtgactattccaccgttccgaaaattcaatctcttcatcatttgagatgctataagtttccaataactctttcaataaaaagctgcttgagccatcatcctctgaggtcatcgggatttggcgcaaaaaccccttctccaacgattccgatgatgatctttcattaaacataagcaatcctccgtcatgtagcatgtacaataatttggatcgataacacgactgcaccgtaaaatattattgttgttcgtaattgagtggaaagagaatttgctgttgagttcaattattttttttgcgtttgtaatttaagctcaaacattttggcgggtcagtgaaaagaaattaaattgagctgcacatttcccctggctttcactctttgagtgtttgtttgcaagatcagcactttgttcgatttgtttgttttgttcaaattgttgattagaaggcgaatgaatatattttatttaaattaatcttcacctttttggagtggggagcatactttttttttccttctcacttttcttctaatttcgtcaggagtatcttcattgataatttggaccatgtcctcaaagtctacacgattattggttccaatttcaaacgatgatcgatttaatctgtagtgtctttcaagagagatactttctgagatattaaatggtgtgaatattttttttccttctttaaactcccaaatatatttgaattgtttggtttgatatgcatccttgaaaaaatttctgtctgttggattaaaactgccaatatattgacgagtaggctcgagagtgatccattcaatctttgcgctcaatgtacttctgttggatgctaagttcaaaataccattaatgtcattcaaagtaaaatcaaaaaaaggatgttggttgagctcctcaacagcataggtgtactgactcttaatacgactgtgcaaccagtatggagaaataagatcttttggtattttcacaatacagtagtcgtgatttggcgaaggcgacgaaatgtcaaaagctgaggtcagtattccagggtgtgatagtgtgaatgaataacggttttgaagccataaaatttttgccaaaccattccttctacactcgtcgtcgacaaaattattcgctttaaccttagcgggttgatagtttggtattccaatccgaaatcctcgcaatgcatattttacgagtcttgactcataactatataggtaaatattattcattcataaaattgtcatatttcttcacttacgtggtggattgtctatctggatccacaatattagttcttgtgaccaatgattcctttgctcttggaagacaatacacgttactgccatcataaccaaaacaacaagaaggaatatcgaaacccataagaatctcagatggacttttgtagatacgtaaaataacttggactgttctaacgggctcataaaatctaaaagtaagggcatgggatgtcctgattaacataatgtcagtaaaagcttttggttggtttgttgcttttttaaaggctcgaagccttttcttaaagtgtttgtaaatgtccacaagtttttgttctgcttcacattctgtgagtccatacaagaagagatctatatccgtgttactccatcgttcgtgtttgttgtagtatgatattagttttttctggaaattttcatcaaaacaggtagcactgtgttgatcatgcttttttctgttaaaatcatttgaatagaattcaagctcgtccatagttgcctccgatacatctccatcatctaattcatcgtcagaatcagtgattggattgttggaagagttggcaaatggggttgcaaggatggcccgtaaaacacaaccacctgcacaaaatacattctcccagttcatgccatcaaaaataccacaagtgagagtgtcgaactgaatctgaaaggtctcaaaatcaggacacagatgtggaatagagggcttggagactttaaacttggatgcttccattggattttcaaaatcaaacaacaaaccaatccctttaggagggtttttcatcataaatgcttcttgattagcgtcaaatacattcagcaaatgcaaatatggattttgaagaatttcatggtctctatcagaaacaaacaaccttctcaataaatcttcttcttctttcattcttctattgctatatccaaggtgttcaatgtgatatcgaagtatattccaatattccaacaattctaaaagattcaattcttttgcttccttcttaatttgtgttttcacttgttggtcttgcttgcaaatctcatcaaatcgacctgtttccaaaaagtcaaagatgatatgatacaccaacggatctctatctagaaaaatagtattttcattggtttccttgagaagagatggaaacaggctttctgaatgtttta

SEQ ID NO: 4876 - DNA, 4103 bp, Naegleria lovaniensis
  source 1..4103: mol_type = other DNA
taatatagttggcagctgatgttgtggtcaacgttggtttagacgagacagtgggtgtgttaatattcgacattttttaaagttatttttgtattttgaaaacaagtctttacaaacaagagagtgaaatcatccaacctcaattagaacctgcggtggttgcgtctcttaccttgtgtcactcttaatttcgtaaagacgtgctagcaaaattcgtgcgaaaaaagaagcgtttgacccgtttcgctgctcttttgtttcaaaattgataacttggtaatgagatttaggacagagtttcaaacctgtggttctcattcgctgttgtgtgtatctacagagcaattttttatggtcattgttgtttttgtatgcatcattgttgagcacaacaacatcaaaccaatgcagagattactactgagaagtttaaagctttaaagtctcttgtataacatggtcagttgtaagggattaggcgatgacaaaaattgtgtcttctgcgttaactcctgccgtacataaagtactaaaaattccaaaaaaaaaacttcgtcgaggatgggactcgaacccacgcggatttctccaataacttagcaggctaccgccttaaccactcggccacctcgacttacgagcaataaaccttgtggacactcaccaatgtttgttaacctttttgcctttcaccgaggctctaccctaaatctgtatcaaagcgctcacaccaagaagccaataaggctttctctgctctaaagaagaaaaaaggctcttgtgatacgactgaggttcaaggatggaaagattctgcacccgctctctctaatcaagatctggactctaatgttcaaaaggaaattaccatggttatgattaaatcgttcatgggcgaaaaaacctcctttcctcatctatggaccaaatccaaatcaacttcaaggcaacgatgtatttccatgattgtcgaatacatgacagtgcatcaccaaataatgttcagtggagtaaacttttacaatagagcaaagaatcagtaggtttatctcttgctcaaggtgatttaatcatgaaatgtccaaaatggttgttccatgatccaccaagaacattcaacgttacggaactctaggaggtttcaaagaacctttccatagatcatgaattccttgaaagattgaagaaatattgcgagtctattctaaacggatctcgttttggatttaataaagatgttacgtttttctttagggaagatttgaatatctctccttgtgaattaacagtttctgaagcgtttgaaagattccaaaacagaccggtttacattgcaacgggatcaattaatgatacaggacatctttgtggagtatggtcaccaacaaccattcaaaaagagcattgtaccaaggatgatcttcttaaacttgaaggaggggcattcaacgttcatccgttacactcctactcaagaaagcatcgcttccaattatcttttccaattcaggactcgcacaaacaggttcgtattaattgtacataagtattgcttttcacatccaccaataacctcagcattaaaaactattgagcaatatttaaagaaatccaatctacaagcatctatgtccactcttaagcttttgttcgaaattattggaacgttgatcggagatggaaagatcgccctcaggtaacactgtaacacgacgaagaacaactgcgagatgttatcttgaaatttatggataccgttgccacgaagaaaggtcagcagtggtattctgaatgttatacaaaagggccgaaagaaaaagaagagaaacgaaagattaatatctgaggtgaacacaatcctgtacacacaaagcacgagttggaactaatacgggcagatttgagagatgaaggatttcatctttcttgctttgaaatccattttccgttcacaaattttaacaagctaatgagagatttgggtttttatttttacgacacgttgggtcctttcccctctctttcactcatttgagtgtttgcttgcaagatcagcactttgatcgaatttgtttgttttgttcaaattgttgatttaaataaacgtggagatcgatgcatgaaaattattctttattgaacaattccactcagttaatttgagttttcattggcaatgttaaaaagaattgtcaattatttcaaatatagaatgttagaatatcaagacggttattcaaacagagtttggaactgttttattaaattcatttttaattttcgacactgtggacgacaatttgttacaacgtatgagaagttccatccaattcaaatccaaactcattcaatacagtgtggatcaaaccatttccttggaaactgaactaatcattcgtgaaggagtcaatggatacatctcaactagtaaagagaaacaagccaaagataatctcctaaaagaatttgatgaaaagatggagaaactcctcaaggatggacttaacaagtaggaacatggtttgatggtgttttccttgttcgttgctattgtgtactattaagtgaatgattcaatcaccccttcaagatgtataaagcaccttgtaagccaattaaacttttagacaccgggcaagtgtcttcacttcatgtatgaaatggatcaagtgatgaaacaagagcaaagctcataattgaactcacaaaatttttgagcacgaacagtttgaaaatgttgattcacaagattagtcgttttcaagactcctccaaattatttattgataatgatgcaatccgtcatcacccatagcgacaaaacaagaaagatgtaataattgttgtatcctcatcacccttccaaagtgaatcccaacttgatgcgcctggcgctacctcacccgagctccacaaacagcaagtcgatagagttcaacgcataagttgaaggacaacaaaccgacaaaaaaaaactcagagcgttgtaagagaaggcaagcggttgactcgtacccaaggcttctgttcttttttgaaaaaaatacctccatccgttacgcttcaaaggcgatttttcccatcatcccttcttccaaccacatcataaactctcttataaaatgaactacagttcagcttcactctatgtcggagatttgcacgaagacatttcagaggctcttttgttcgaccttttccatgaggttggaccaatcatctcaatccgtatctgccgtgatgcgatgactcgtaaatctcttggatatgcatatgtaaatttccaaaatccacaagacgcagaaagagctcttgataccctaaactacactagcgttaagggaagaccaatccgtattatgtggtcacaacgagatccttctatccgtaaaagcggtattggaaatatcttcatcaagaacttggataaatcaatcgacaacaaggctctttacgatacattctccgcattcggtaacattttatcttgcaaagtttgtcaagcaaccaagaagaatgaaactggtgaaaacagcactgaatcagctggatatggtttcgttcattttgaaactcaagaagctgctgaaaaagctattgccaaagttaacggaatgttgttaaacggtaaacaagtattcgtaggaccttttgtaaagaagagcgaacgattgaaggttttgagcaatgaagattcattcacaaacatctacgtgaagaacttggatccaagcgttgatgacaaagaattcaaagaattgttctcgaagtttggcgagattcaaagtgctgttgttatgagaggtgaggataacaaatcaaaggaatttggttttatcaactttgcagatcacgcctctgcacttctagcaattgatgatatgcacgaaaaggagtataaggggaaaaagttgttcgtcggaagagctcaaaagaagagcgaaagaagagccaagttgaaggaatatttccaaaagttgaaacaagaaaaggttaacaaatacaagggattgaatctctatgtcaaaaatttggatgactctgttgatgacgagagattgaaacaagaattctcaaagtttggcgaaattacatctgccaaa

SEQ ID NO: 4877 - protein, 179 aa, Naegleria lovaniensis
MSSQPPLDLSSPLQIRLMLKEIECETLKQKLSALECNPMSNLKFERWDDSIHSENSILQQRFHHMLLYIHQLESDIEAKNRRIDLLELSLNNRRKRRGGAMGDPANTNADKDDLNEQTEQLTIQRNLVKAFMKRRNNRRNENMHSKREDTSTHSPNSSSNISSTTFARKNHRSVMRKKE

SEQ ID NO: 4878 - protein, 445 aa, Naegleria lovaniensis
MLNSDFAQSHLIATSSEKTHQFLELIKKQNPTLSGFVKIYARREYIYAITYPDHQIYYYQQLYHQHHQPGSLQASLLLDPLEKNNDGQWIGWKRAYFVAASYNCCYVLVDRIVDGIISPDFREGYVNHELPNGECYEIPKRSSVVASVTCDMDPSNSEFVILNPSNTKLWLKGIDEALRQDEFITYMACGAYTLVLVTNQGRLIVGGSNGFGECGYDGYSTVPTAPHPFCEKHPNVKFCKVACGDHNIVALTQCGRIFVCGYNSSDELGMKNTGNQKQITESVEFAKITHSDPAIDVDCHYYGVIFLTRNGSVYVSGGSNRSLSKITLPYLHSGTLFNTVTSIGAGSHSFLISLTNSNSDLLMLKVSRDALNISEAAQMKKEFLKGISSQQQRIGMTGSDQPSFSYIGYIQQRAVRSIKTLQKQLAQHLTNCFEDKSFADINFTC

SEQ ID NO: 4879 - DNA, 4088 bp, Naegleria lovaniensis
  source 1..4088: mol_type = other DNA
tggaaggaagatcaaaatgttccattgacagattctttaagcaataccttaagaatccattcaaggaatctggacaagtctacaagttggacgaggtctctcaaagctgtgtcattattcaagagcctaaagaaccaaaagatcacacccttctctcatctgcaactttgcaaatggaactcccacctcgtaaggagagagcattggccaagagaatgaaaatgttctatggcgctctcagacatactgccacagaaccacacgaaaccttactctactatgaaaaggtttccaagaagaatttgtgttctcatttccatggaaacaactctcaatcatcttgcaatggaaagagaagaattgcaaaagccatcaagattttgttaggcgtcttgtttgttcttgctgttggtactcttattgcgtttgcagtcattagtttttgtaacaagtctgtcattaggggactcatctttttgcatttgagcattgctgctattggtgttgtcatctcaaagattttattcagaatgagaaaggttcactattatattactgacaagcgtgtgattcgagtggatgagttgccatgtcgattgcggttaacattgagatatgtgtcatttgacaagattcatagtgtttgggcagatggtaacaagattcatctcaagcttcttccccatgaaaagactggaattttctttgaacatgccgttgatcctgcctttgttgtgaaccttattcaacaacgcatcccatcgtcagagtctaccaacaacagtggagatgtcgaacttcaagaacaaccaaccactgaacccacagcaacacaaaattagcgactccattaagagtgagatccgttataaagtgtaaatagttcaagacaacacatgaacaatgttaaccatgcctcatcgtctgtcacttttcactcaccattcagatgccacaaaaaaaaaatgtcgtcacaaccaccactcgatctctcttcccctcttcaaatccgactcatgttaaaagaaattgaatgtgaaactctcaaacaaaaactatcagctctcgaatgcaatcccatgtccaatctcaaattcgaacgatgggacgattccattcattccgaaaattccattcttcaacaacgatttcatcacatgcttctctacattcatcaactcgaatccgacattgaagcaaaaaacagacgtatcgatctattagaattatctctaaataatcgaagaaaacgaagaggaggagccatgggagatcctgccaataccaacgcggacaaggatgatctgaatgaacaaaccgaacaattgaccattcaaagaaatttagtaaaagcattcatgaagagaagaaataatagaagaaatgaaaacatgcattccaaacgagaggatacttcaactcattccccaaattcgtcgtcgaatatttctagtactacttttgcacgaaagaatcatcgttcagtcatgaggaaaaaggaatagatatcatgactcttgatccacaaggattttgcgaccattgttggaatgttgtcatgttcattgtatattggaattaatgatctcgatttgtgttcacaaattaatgaccttttgagcccgtcattttgtatgatattgtttagtacatgtataataaacgttacgtataaagctcgaaacaatttgtgagatgtgttgctatttgtttctgcaataacacctaccagaacgacgcctacggttcaatccaaaagccctaacgtttattgaagtgttattacgagcaaggagtttttttaaccttaacatataaatgtgagtccagatcaagagaatttccatggtcatcatatttatagtgtcttgtttatgtattggatgatgatcaagtggctgaattatattgacagagatataaatgaagcaagaattattgttattcgatccttcctactctttgaattagtttttgagcactttgtgtgtgtttaggtctttccccttagggtgttaaatacatgcaagatcagcaccacttggttcgatttgttcattttgttcacagtgctgatttgaataaaggggaagtttcatattcagaaaagtattttttcacttgatgtctcgtttaatctcaatacacatcatgatatctccattgagacatgatcacaatgtgattgccttgaacttgatttgcacacgattcgaattaacatgtgaaattaatatctgcaaatgacttgtcctcaaaacaatttgtgagatgttgtgctaattgtttctgcaatgtcttaatagaacgtacagctcgttgttgaatatagccaatatatgaaaatgatggttgatcacttcctgtcattcctattcgttgttgttgagatgaaattcctttcaagaattcttttttcatttgagcagcttcagaaatattcaacgcgtctcttgaaacttttaacatgagtaaatcagaattggagttggtaagagaaattagaaatgagtgactaccagctccaatcgatgttacagtgttgaataatgtgccactgtgtagatagggaagagtaattttagagagtgacctattggatcctcctgtagcaagttaatttccagcgtaccgtggatggatggtttaaattatcatgaaaaccatgtccatgaatcatgaatattcaatggatatagttttcaggtaccttgtgtctttaagacttacctgaaacatatactgaaccatttcttgtcaaaaatatcactccataataatgacaatcaacatcaatggctggatctgaatgtgtaattttcgcaaactctacactttctgtaatttgtttttgattgcccgtgttcttcattcctaattcatctgaagagttgtatccacatacgaaaatacgtccacattgagtgagagcaacaatgttgtgatctccacaagcaactttgcaaaacttcacgtttggatgtttttcacagaatggatgaggagctgttgggacagtgctgtatccatcatatccacattctccaaatccgttggatcctgtgtgaattgaaacacatccatcgaattacaatttttcaataatgataatcatggtgtgtaaaggatttttaacattgaagcctacctccaacaattagtcttccttgattggtgaccaataccaatgtataagcaccacatgccatatacgtgatgaattcatcctgcctaagagcctcatcaatgcctttcaaccaaagctttgtattcgatgggttcaatataacaaactcactgtttgatggatccatgtcgcatgttacagaagccactacagatgatctttttggaatttcataacattctccattgggtagctcatgattgacgtatccctctcgaaactttgttccaacattaataatatcgaacaatgctaattttgagactctaaaataaggaaatactcacatcaggtgaaataattccgtccacaatccgatctactaaaacataacaacaattatacgaagctgcaacaaaataggctcgtttccacccaatccattgtccatcattattcttttctaagggatccaacagtagacttgcttggaggctacctggttgatggtgttgatgatacaattgttgataataataaatttgatgatcgggataggtaatggcatagatatattctcgtcttgcatagatttttacaaatccagatagtgtcggattttgttttttaatgagctcgaggaactgatgcgttttttcagatgatgttgcgatgagatgggattgagcaaaatctgaattcaacatttttttttgtaaattttacagaaaagttcaataatttaataataatgatcaaattcaataatttaataataatgatcaaattcaataatttaataataatcagttcaataatttaacaatatttacatggccactcttccactgtaagatccagcttgagtcacataacgaacccatctcttttgttttggtttcttgtcatcattcaaagaatcagatccaattttcaaatatctcaattgaagaccactcat

SEQ ID NO: 4880 - DNA, 4116 bp, Naegleria lovaniensis
  variation 2826..2835: note = n is a, c, g, or t
  source 1..4116: mol_type = other DNA
cgcaaaattatcactgcgagagagtgcagatgtcttcgacatcttgcaattcgtcaaaaggaataatcatcaatttgagagggtgcagatgccttcggcatcttgcaattcgtaaaaaggacgttggaatcaattcattgaattgcagctgccttcggcatcttgcaatccaacgtaaggaatgtggtgcgaacggctctcattgtaaaacacacactttggttgaccaagattttttaaaaatttctctgaaaaaaatacctcaacatcaaatgcaaccgtcatcatcctcatcataataagtgtcagttggaagctctcacaacatcacccacccaagagagtttgaaatgatccttcattcacgagtcatcatcactaggtatccactcagagttaccaaaaatgctgaattggttgctgtccttgagtgagtccttgatgtaccacctccgagcgatttgaaaatttttttgagtgccgacgcatttttcctacaggagagttggaatgtgtagaagacttgaataaagattactttaattttttgaacccaataatcgggcaaaatgttggcagaataaaccaaacccaaacccagacatgctatacaatcaatttcaatgaacgaccatgtcaattcatgatgaaacttgctgatgacggacacaacaacgcagggagttttggcgcgttttttttacaatttttttttgaagaatatcaaaagttcgctgagcaacaactcccacaaaaaggatatatgaaaccacaacatctacttcaccaattcgaaaaattccaagttcagcagatagagaagaagaaatggagacatttttgatgaattcattacatgagaacaaactttcgagacaaagaccgcatcttcaattttgctggaatgtcattatcgcaaatcaagcgccccaaacgacatgccgcccgccaaaccctcccaaaccctctccttcgaatgaatagatgagattactcaatgataatgatgttgatattataaggacaacaattatatcaagttgtagcagagtctgtgaagtacgagccaagattttacgtggccttaattggcttaggaaaaatacatgatactaaagagtaacaacgatgatggacttttccttagaatcacaccacgaaatttggtgcacacattaccgaggttgatgagcacgtatggaagcattttcagatttcgatcctgtttccttcatattcggagcagccaagaacaaatttcaatccaaaccgcacaatcccaataagaagaagatgaacgcgaccgaaaccatgataacgaactttcaaagagcccatcctaacagcacagcttgcaatatggttctctaatatgcatcgagttcggacaagatcgggttactgttgatggagaaatttcttggtttgaaagcttcccaaaaactcagtgaagaattgaggaattttagtgcaataaagatggaggttacagttccaatcagacagcattgctgatgagttgccgatgacccataatccaaagatgaagcgaaaataatttactgttgatgatgaagtttttttcaattgaacactgttttttgcgaaggcatgttgattaaggcacatcataccattaaggaaaatcgatttggcccttgccgtccagatgtatacatttgaccaaatatattcccgctcaaaatttttatccttcctgaacctggactttccaggtcaaaaatttgaccagctacaagttcaagaaattctgcagtatggattgggttttggaattttcatcaaaatacatttttccaatatcgtttcctccaatttcataatattgaggtaatgcattggtcgtgttcatggacattaattggaataattcactcccaatgcaaacatataacttccaacagagaacaatttgatcatgttctctgtaagcacaactgcccatatttggttttcaaattgtgtgttgggtcttcaccaccttgtgtgcgttgggtcctctcccctggctttcactctttgagtgtttgcttgcaagatcagcactttgttcgatttgtttgttttgttcaaattgttgatttaaataaaggcgtcagtgcaatctcaacccttgaacgggtcaaatcactgtttggttgatgcaacgtcttgaaaaaaaaatacgttgtttttctgtcaataatgaagagaacaggctccaatagcatcgttcaacggttaattacccacaacaacagcagccacacatcgagcctcaccaaaacaacaagacaatatttttgccccagaaattgtgttttcaattatgctttgtcgaacaaaccaaacataataattgttccgaacagcaaattgttgtattatccaacaacaaccacatttggccaaatacgttcttacaccaccacaaaatggtggaaggagaaagaagcatcaacaaatgataatgatggtacaaatatttcagcgccttcatcctccgaaccaatcactctcaatttgatggattacaagaaatggaatgcgcaacaagttgcatcagtattgacttctcctaaatctttgggtggtgctggtttgtcggctgatgatgtgaagcctttgcatgacgctggttttgatggatcatctctctacaatattgttgagaatattcaagacaaggatgaattttttgcggttgatcaactggatcgtatttacaacaaaagtagcactctacaactctccaagacttgccaaactgttgtattttgggtgttttatcacctgctcaaaccaaagcatggcaagtcattgaannnnnnnnnntagcacaatggataactgctttcaaagaaggtacaaatattgcaaatcaatacttgttttcgttagttaaatattggaatagtgatattctttccagttttcatatcgataatttgaaatacactaatgaaattgtgagatatatgagtagctttattgggtcaactcagcctgtattttatctatttgatgaatataatgagatgtttgaactcaatgtttatgggaaaatgattgcccaacaagattattttcgaccatacaccaattggaccagcagtacaagaggaaataataccattaccatttattgtggcagcgctcttgaaaacttttgcctggtggtgaagagggtaaagtaatatatttaattcctctagccaaagatgaatttaagactcttgtgaaagattttgatttgaaaccaaatgatcaaagaatcgaaattgctacaggaagaattccaagagagctcagttatttggcaacaaggttacatggacgagcaattacagatgattttattagatcatttattgagtatagatgtggaagtttttttaatagaattgaaaactttccaaaacatcaacaactaaacttattacagaccttagatgcgctattttctctagatatgagcaaaggtagaccaacatctatcgatggatactgttataaccaaggtttattgtatagagcagacaattccgtctttattgtatcaacaacgcagctactatggccctatggaggttttattgtaaacacaatattaatacgctaaatatcaagaatgtatttccaaagtcagtccaaggagggttgatggattatggtttaaagatgcttgaaggagcaaattcacaacaaattacataccataagatattgtgtgctgtgcgagatgaaaaatttaccagagaaatcgttactgaaacgattcagtacagcgtaaattttccagttgcattttctagatccgacctatctactttattctatgaaaattatatcccaacaacaactgttcttgttgttcctgacaccgataattttccttgttttgactatataattattgaatatacaaaaataatatcaaactatattttaaacaagtaataatttcgactatagatgaacattattgggaaaaaaacacattcacagactttaaatcattatttactagagattatatagtgaacaaaaagtacaaggcctctcaaccgggtaaacttgacgaggttcctgaaagaaatagattttctctattgg

SEQ ID NO: 4881 - DNA, 23 bp, Mercenaria mercenaria
  source 1..23: mol_type = other DNA
gatctaaggacaagaatgtctcc

SEQ ID NO: 4882 - protein, 478 aa, Mercenaria mercenaria; identical to SEQ ID NO: 596

SEQ ID NO: 4883 - DNA, 11573 bp, Mercenaria mercenaria
  source 1..11573: mol_type = other DNA
  variation 8878..8977: note = n is a, c, g, or t
ccaggttaagttatgcgaggtcaacttgttaaaatttgttaaaattgtgaggttggttttaatctatttaagtgataaaacaataaacacagtaattacgtaccgttacttttacttaaggctaattatcaactagctttatgtttttttcacaacatgtaacgaggggcattaactgtctaaccttgggaaaattactggcattcacctacagtcttgaacatttttccaaaacgaaatcggctttggtggtgtgtggtcccaggtgtatggctatgaaaagttaggtgaggttaggtgcggttagggttttggctattttttgaacaatatgagggctactggctgcacagcattgggcaaattactgtgacaatcagtcttgttcgttaaaaatacaacaaggcaaatattcaagtttatgtacttttattgcggttacgagtgccaatcgctgcataaatgtccccgaaacacgttgcgtttcttctaggcgtttgataaaacacaaacggtggcataggcctgtaatgtttcttatgatcgacttctctcatgaacctgtccgttatcccattatcgacaaacgacagtagaaacgttgcattagccacaatccaatatacccgttcattcctggcgacaaaggttttgagttcatctctccacagttgtatgtcataatagtctatcacaagtatcaagaatctagtatcatatttcgacaaagctgtctcgtaattcacaacgggattcgacaagtccgtaatgaacagcacatgttgatgttcgatgtcgtcgtctgaaagaaatccatacagttgttcttccaaataactctggtgacatctgctgagcaacaatgtatgctctgtctcgttgtaattcttattttcgtcatcttcgtttcttaatagcatatccagagttcgagatctctgtctcagtgtttcaatgctaacaatgttcactttcatctcgccaaattgttgagaagaattattttgcatcttgacagtttaagagctgaagatataatgaagctcaagtgccgatttccccgatactgtaccgaaaaataactttttcaatctatctgctttctgattggtcagtacaaagtaggcgtggtttaaatgcgacattctgattggtcaaaacattttgagctagaaagagtgggcgcagatgcagacttagtgtcattctgtatcgctctgactgtgtaattatgtctaagaacaatataacgacttttccgagtttacttttattgttttaaggatagtgttactagaaacattcattatttttcatgtttattactcagtgctaaaaaaagttatcagtaattcaaccaaaatatgtcttctatcttgtaacatcttgtcatacatatatcactccattttcggtcattaataatgtaagcgccatcttttcctgttcgcgcttcttgtgcttttctacctgtttttttcttagctttcaaaatacctctttgaatgagctctgcttctttttcttgcctgtttccgtgttcatgtattccatcatcagaatcatatatgtcatatgtatcatcaaagcaccatttgcatttgcagtctggtcctgcgcaatttggatatttccttcgtctctttgttgcatcttttataaagccaggttcttcaccagttttggcaaagtgtgccagttgttctcttgcatttggtttagataaagcaaaggaattcgccattgtgtcgaatactacagagttattttccatatctatgtttaatctgtcatgttcaattttgtgtatgatccacatgtcttctggcaatttgagtaggttcggcctgaagttagcaaagcatactactttaggtggatcaaattcttttactttattcccgtactttgtactgaacagtcttccgccctttagtaactcaaggaaatgatagttgatatgttccacttctgatctatgatagtccattatgaccattggttcttcattgtatgcgtatgataggtccatcgtcctaccgttgccaagtacgattgcaccgtggtatgcccataggtattctcctaataaggttttacctacatttcctgtttcttcccataaccaaagtacttgtctatcagtttgcattgctatgagtttcaatgctgctttctgccatggtcttaaagttacgttttcaagatccaataccatttcgtctactatgttttcttgactgaagttttcgaagtgttcactgaatacacgttgttgagctaatgttaaactgcgatatggatagtcagtctcgtccagattttgagtacctctccgtttagcatacatataagctctgactttcaatgagagatagtctgtatccacattggcgtagatggttttctcatcttccttggagacatacttgatcacatctttgattttcttcacacgttcaattatgccacaactgaacctcatttgcttcatccacttttctttaaaagttttgaagttcatcttctttttagtttgtatgtatgcatgagagtgacccttattctcatctgcactttttccaaactcgttacaaatgacataactccgtatccagttgttgtgtatatttcttgagtccatcttcttcaagaacttgtacttcttcataccttggtttatagtcaacatgaagtgtacacctttaccttctcgtattttcctcttgagttttttactttttggttctatagcagacaaatgtttctttgtcttgatgtgcctcacccaatttgacacattcatatccactttacagtactcacacatttttctcgagttattgtcacgtcttctcatgttgaagttgagtgcatctatgcggcgatatctaatattacgatttcttttgtactgtaccgaaaaataactttttcaatcaatctgctttctgattggttaatacaaagtaggcgtggtttaaatgcgacattctgattggttaaaacaatttttgctagagatagtgtgcgcggatggttttaactctcattctgtatcagacaatcggtcggtgcagccgcgaattttcttagctctgatcatggaaatgagcgatcaacaggtagtggagacattcatccagtacaagaggaagggactagtcaaaagggcacatcatctaatagaaaacgttgacaacattgtgacgtgcatcaacatagaagagggacgggatccatcgagtttcaaacaaaatgtgtctacgatattcaaacttaatctgtacgaagacgaaatcaaagaagcaacaacagaccaggacatattagacgtaatatctacagcaagattcgttttgcagtatcaggatctgttggacgaaatcggtgagtgtagactttgagcttgatactagtatttttcacttcaacggtaatcaaacagtcaaagaaaatcattttgatttgaaattgcagaaatggctgattgtcaatagaatagaaatgttaactgacacatgttttttcttttctgtttcagtaaacataggaagaaatcgacagttgcatccgatagatactgtcgtgatagatgatgacgatctaccagatatcattagtccaactttgacgccaacgcctacatgtagtttgaaatcgaaaagtcctgtgaaaggaatcagaggacttcacaagcgcaaaccgtacgctaaaccttcagcaacggttacaaatgcaagcagcaccagcagtactttgaccgaaacggcttgggaaaagagggaaaatgagctactgttagctcatcagagagaactgtccgaagccaagcaagaggcaagggacgaactgatgctgtgcatcatatgcttgtccgcacagaaagatcatacactggtgccttgcggtcacacattttgcgaatattgtgtcgatcggataaaagtaaatggcaagtgctgcttctgcaatgccaaaataagatcgagcgtaaaagtgagactaaccgattgatacttttgctttgttctgatgaaagatgatgatgcattgaaaataaaatgttcagaacagtgccgtgtctttgtcatatagtaatgtaaacatagcaatcccacttaggttagacagattttgaaatgtcctaatcgagactcggtatgtcatcatgtttctgtacaagtgtacaaagaacgctgtcacgaatccttatgttttaactttttcattatagatacgttcacgccttgagaaatataataggcatatgtcgactcatactggagaaaacgttgcataaattatgggcatgtgtgtgttataacaatttctgtcgtggtgagaaaaacaagccagtttgctaatcacctaaaagttcgtatcaatttcaaagcaaaatagatggtctaaactaggcatcaagggtcttcagcatgtaaaaatatcgtgtccaattctcaagtatgaattgacatttcgtttttcaaccataagctaatcggacatcggcctgaggtacgagccgacgtattcgttcagcatcgcaatatcacctttagaaaaatatacagtaccaaatttcctcgactctgcatttatccggacttgtcactggcttgtctcgagaccaaactgtcatctgagaatccaaagtggcatgtatagaatctctagatgttttgaaattctttatactaacagaccagtaggagaaaattccaacgcgtcatgttgattgttttcctaccgatcgatatttgaagaacaattagcatcaggattatgacaaaatgcttaaaatcctgtgggacaggacaaatgccagattaaacaaatgctttcagctattaacacattcgacccgcatgacgacttttctagtttctgttgaaacaggcattggtaaacttttgatgaaaaaaaagtattaaagggaaatattatttttcttagtcccaataaagccggttgcacttcggttcaaacctcacttcaaaatgaagagaaaacgagaacagatgactttgtggaaagccgcgtttgtcaacgggcaggaaacgttcaagtcctggattgacaaggcacgaatgctggaattgaactgtgacgtctcttctgcaagctcgacacattactctgatctgaacttgaagacaaagtgtgccaagacagacgacaaatttatgtgtaattattctgtctgcatacgaccgacttctaagcagaagcgaacgttgaaccagatgctcaaggtgagcaactatgcttacaattggtgcaattacctagttaaggagaaagacttcaaaccgaagcagttcgacttgcaaagaattgtcgctaaaacgaattcaacagacgttccggccgaatacaggcttccaggagacgactggtttttcgacaacaagatgtcctctatcaagttgaccgcctgtaagaacttttgcaccatgtacaagtctactcaaaccaaccagaagaaaacaaaggtcgatctcagaaacaaagacattgttcagttacgcgaaggatcgtttgaagttcaaagcaagtacgtgagattgctaacggaaaaagacataccaggcgaacgaattcggcaatcgagaattgctttgatgccagacagtttttcgaaatcaaagaaggactggaaagaaaggtttctcaggctttcgaaaaatgtatctaagataccacctttgagtcacgacatgaaggtatgcaaacgtccgaatgggaaattcatactgcagatttcatgcgatccaatatgtactcgacagatacaagtgcaaacttcagattcgatatgttcaatcgatccgggaggcaggacttttgcgacatgctatgatcctagcaatataaagacatttcagatcggacccgaggcagacaaaaaggaaatcattcacgaatttcacaacaagatcgattatgttcaccgtctcttgtcgcatgctcaggagaaaaagcagacgcaagcggtgcaagacagaatcggacaactgaagaagctgcacctcaaactgaaaacgtacgtcgacgacgtgcacttgaaattgtgctcgtacctggtcaagaactacaaactggtcgttctcggcaagatatcggtttcgtccatcgtgagaaaagacaggccgaaccatcttgccaaaagcgctaacagggacttgctctgttggcagcactacagattcagacagagattgttacacagagtccgtggcacggactgcgaagtgatcatacaagacgaacgttacacttccaagacctgtggtaattgcggtgagaagaacaacaaactcggtggaaaggaaacgtttacttgtgaaagttgcaattacaaaactcatcgagacgtcaacggagcgagaaacattctgtgcaaatacttgggactttttccatttgcagcgtaacgaaagaaaaatgacaattaattgttcgggttcgattctatccccagggctcgaatgcatttttgtcacagattttgccaatgcaagatctgggggcaagaatgtctccgggtgaaaagagtcaggctggaaagattacggggacaggtgctcaaacgcctttccattttcggtatatataaaaacacaatgctttgacatttctcatgtatcatcgttttgaattacaagaggtttctgccgtattggacaaaatcatacaaagccagtgatgccatcatacattagctttcctatttaaaaaaactcgaatgtggacagtgttggcaaatttgtccaggtatacacaaatgcaatgttttgaaattccttatactatcatcacactgtcataggagaagtttctccctacattggacgctgaagtagaatgactttgctatcagacaagtagtaaaaaaatgttcaacaatatgtaatgcattactaatacaggagaaaattccaacataatgttgtttgttttccttctgatcgaaatttggaaaaagttagcagcaggatagtgagaaaatgataactatcctgtgacgcatcgggacaaaattccaacatgtagtacagtatgagatcggtaacatggatagacattcgatgcccttccccgtacatctaactgcggcgtccggacagttaggcaaccaaagagtgtattcgcacatctcattagaggaacgtcgtgcttccctttggcggggcaagagcatttaatccctgtccatgaatcctcgcagcgtcgggttaagcaattccctataccggcttcgctgcctcgccaaatatagagtcgggtcgttacaaccagcattacacttaacccatgccgatcagaaatccaaacaagagaggaaaaaatgctcaacaccatgtaaggactaggaaaaaattccaacatcatactattgcatcgaaaagcatttcaaatctctgagtaacgtttgctatcatatagccttatggtcatgttttgacattctgatagtttgatacgagtcttataatgattctgtgttaggcctacagcttactcgaaaggttgacaagacgcatctctaggattttgtaatggttttcaaaaagatgtaactctgtcattctcaagtatgtaagagttatcgctttattcgcattgagacgatgcattgtgctttactttttcatcatactacagtatcagaggtttgactgcaattcgatgcaatggcatgtactgttggatatgagaaaggctcgttggcaaaaataaaatgagacgttcaggaaaaatgatcagtcagaaatcagagttttgttgtacaacgtgttgaaatttcgaagtactatctgccttatctaatatctcaaaagtaagattctatgaaaagtttttcagtttgactgtatttttcctaacgtgtcacgttgtatttgccaacgatccttacttgatgtatcatatttctccgagatgtgatagaccgcacttgtctacccagtacactaaataagcaaaggtaaaaccagcgtgagtgaacttgttcattcacacgggtgaatacccttatctcttagtattgggtatggacagtgtacccggcaaacaagtcggcatagtataaattcggacagacaggagaggctataagacatgatacagacaaacacaccaaaccttcatctcggagtacttttctatagtgactgttgttactattgataaatgaaaaagcaaactcatcaagcaatagtagtgcctcttttacgggcattgcctcttgtacgggcagatatcaacattagaaaacaatacatgttaatatgaaatacatcagagtccattattttcaatggcaaaatgtctatctctgttttttcatcaaaaaaagcacacagcactgtgaactctagcatcttgtctgtttggcagcctgtaatataaatgaatatctttattaaactgaaatgcattatgaaagtaactggtctaagatcatttatcataaaatgcaagctataagaccatggtgaaaacattaaattaacatggtgttgtacttcttgaaatttaatctagctgtgcatattgttgaaaatgaatacctgattatctttccataagtctactgtaggaaattgtcacacaccactgctgtaacatctttggcagatcaccacttcacaacaatgttctgaaaataaaatgaaatagaacatcagtcaatcaattttcatattttctatgtgaaatgacactgaaatgctttgaaaagtttcttcaatcttacaaaatctatgacaaaactgttcaagtatcaagctggactggcattacacttgctgagtatttgtgaaatgcataggcttaccttattttgtctgtggaaaatctgtcacacaaaacnnnnnnnnnnnnnnnnnnnnnnnnnnnnnnnnnnnnnnnnnnnnnnnnnnnnnnnnnnnnnnnnnnnnnnnnnnnnnnnnnnnnnnnnnnnnnnnnnnnncgcaggtttctaactttcattcagcaaaacagttaaatggatagaaatttgtttagcgaaacagttaaatggatagaaattaagcctaatttcttattttctcagctggtaactgtatgaagataaattaaattcaagacagagatgcctgtataaggaacaatttatcaacaaatatgtatgactccaaaacaaataatttggtccctcaggcttttaattttaggttaaaaacagacaatcggctgtcaaaatagaaaataatacataattgcattgtaagaaaagcatatctttcatacagacagaaccataaagggaggtaataaaatccgtggatttattaataattttaactattttaaatctgatgttcaaagctgtgataaatatatagagaatatttgtgttgaaataaatttcaccaagtcaacactataatgcaatatttttacgagtggcacagccacgagtgaaaatataaattatggtgttcatgagagaaatatatttcgatcttacactgaaacaaacaaattttctatttattttatgcatttttgatggttttaaccaaattatattaagtttgcccacgcaacatcacgttacgtcagaatgtctttctagaaaaattataaatagttctattacattttattatgataaaatgtaaatatttatgatctttttatcatttataacatatttacctttactgaagaatattttacaaggaatttcctatcatttataattcataccatttcgcattcaaatgtagttccgtaccagtgaaaaataaaaatgatattttcactgtttgaaacagtgaaaatatcaattttatttcactgataaatttcagtatttcacagaagaatataaaataaaagagaaaaccgtcattgataacagaatttaactaaagagtaacgtgttttatgtttataagaaaaaggcagcagctacagcatagtcattgtggcccctcaaacacaacttggtaaaattccacacactaaaagatgacattagattaagagcagtgtacatgaacagtaactcaactttgcttacttaataaagatattccctgcagaaattatgcctgaaacttttgagaataattaaatttcacatgacactttgtgtttgagaagcgagttaaaccttaattacagcgctggacactgttgatcctgcctttgcaaccactgcagatcatgatcatcctgcacatccatgaagtctgatcatgaccagcactttttgtcattcagtcagtatctttttggtaagcaccccttataaaagttaatggtacagtccagattggacgctggacaaattctatatagaaatttagcagggtaagggttaaggaactgcagtgtcactccgggagaactacgttccaacgtaagtcatgtctcaacgatatcatgtgacatatctcaacgacttctggttaccgtatcgctcaatatgacacggcatatattattttcatatatagcaattacttttatgatatttacttatgtcttgacttgaacatgtattcagattctaaaagtaatcgcataaatttatcaaaacatttaaattttaaaaacagttttctgttatttagaaaatagaagcattttgctattttccagaataaaacaaatatactacatttttcaacagcaatacttactgacagtcaatgatcgattaaaggcaatgccagttataatcttagaaatatattactgcaactgctttatcataaacaggcaatatttatttaatatcatgttcctcactctaaccgatgatgttactaactctaaacgcgacataggtaagcgttactgacactcatcgaagtcttgcggctaaacattacttacattcgagtgaaatgtaccagcaagtctgtgactgaaaatcagattttgtccaaagtatgtacatatgtactagtatttttatccgtttcttttattatcatttgatatcttactagcaatgtgtacggggtagcgcggagctgactgatactattgcatgcgcacaccttaattattattaagtctgtaaaaagattcttttgaagcacaggacgcaactaagaaacctgaagtaagcatgtaatcgtaggttattagatttgtatctaggtctatgcacgcgttctgcagcggaaatagagacatgttgcgcgactttatgaagaatgaatgcttatttatccatgcaaatctaaaaatctttttataattactacgtgtatattattccttatttcttgcacaccggactggcgtttccgatgattttactcatgccggcaaaacccatctggcacccccgtgccagatgactctcgtgcggttactgacaactagtggttcatgcactgataatatattgtatatgtaaaatacgaaataagcaggtacattgatagtttttctctgttccttatagtatatttttcgattcaaaatacgttagtttaccgtaagaacataacgttacgctataaatgataaaactaaagtggaactttgttattgtgcgtaacgcaaaacatcatgacgtc

SEQ ID NO: 4884 - protein, 286 aa, Mercenaria mercenaria
MPYSDWSKQFSLEGVCGYAFLVSFCIRTMNSAVSNLLSSLMTKSRHEAVEGFVKYKRRGLVRRAQHLIQNIDNVVTCVNMDRGRYPSLFKSSMSALSKLNLWENEIREATNETDMSDVIAAARFLLENQGLLRDEIDNMDKAKKQITLTDTIVISDEDNDELPDIISPTMSTKSKSPIRGIRGLHKLKPYTRLSSTVASSTLSETAWEKREHELLLAHQRALSEAKQEARDELMLCIICLSAQKDHTLVPCGHTFCEDCVDQIKAKGKCCFCNAKIRSSVKVRLTD

SEQ ID NO: 4885 - protein, 498 aa, Mercenaria mercenaria; identical to SEQ ID NO: 595

SEQ ID NO: 4886 - DNA, 13674 bp, Mercenaria mercenaria
  source 1..13674: mol_type = other DNA
tcctctgtaaggttgtgacataacactgtggtatctttgttctctggtgagaaaagccatttgcaaaacaaatttgcacaatccttgcctctgaatatcttcttatttggcccacatgaagagcatgtcgatgtatccgtcacttccatatccatacaactgtcacaagttttgtgcacaatacataaatttggtaatgaaccaggtatgccacactcagacttgttacaattcacgcatcgtttcgtctcgtcaggtgtataggttttactacactgtatgacttcatcaactatactccgaaattccacaaatatgtacttttgcgacgggtttgtaatatcaacattttttataggccgcatgtagcatttgtgatttttagcaaaatgccctttacacgtccgacagtacttttcaccacacacgtgttgtgttgtacgtgctttagtgcagattaactctttgcaacgttcacacttgaaccagatgtcgcaggtggcctttcctcccttttttttctccttgtgaagcctgtaacaggtggcacttatgaagtacctatgacaatccgaacagtaataccattcctctttaacatcctcgtgaaatcgatgacatactctacaagctctgtgacacttatgagtttccttgacattgtatcccttcatgcacttggtgcagaagtaatttcgatttaggaagccagttattttcgttatcacatcatagtgattatcatgatggtataaataaatcggtactccgtcatttggaccgacgtacatgaaactattgaagcattcttttgacattacgctgatcttgtactttggcaataccgcttgaaatttctttatttcttctatgccgcattctttttcatcaacaccagcaagtcgatgtaattcaatggccagctttttctgcaaactataaccctgtctaatattgtcccatttaggatgtttttctatccttgcttgagctgttacgattgcacgagcacaacacatgtcatccttatttcgaatcctaataatggatttgctttcttgtaaaaactctgccaaattcactttgtgtttagtctttgaaccaccaccgtctggaatgcgaacacgaacgcacgttattgatatagtcttttcaagtacgaagtgagagttgtagttcaatttgccttcaatctggtcaataacattgtcaacagttaagaccgaacacttcatggatggcagatgaatcgctgattctattgaaggagtctgaaacgataattgtaacaaatcacttggtcgtacgtccaccgttacaccatcgatgattgttttgaatatctcctctacggctgacatagcatccgaaacattcttcacgtccaagtcacacatccttaattcgtaaaagaagatgactgtattgaatttctcatgtcttatctctttggtcatcattaacttatgtctaccatcaacgttgtttgaaatgtccgctcttaacttcttgttgatgctgttgtcactaaggtcgtcgagacctcttttatttgatgttatatgagagctttccatcctaactgattcacaggcaaatgttttgtgaagcggttaacatggaattgattttatattgccttttatatattatttccttctaaaggtgtaatgacgttacaaaaaaaatattattcttcaagaggaccaatacttttccaatcgtgatacatattgtatggatgcgtcgtccaacagaaacacgaccatcctctctttattttgtagtagcatccaatgcaacacaaatgtgcacatctaggcgcttctctgaaattcgcatgtattgaaatgataccacaaagcaaacactgatatgtgttttcatcataccagcgttgtgaaacattatcccaaacaacgttgacttcaacccacggaacgtcttcatagtctggaagtattacttctgtaactttatcattcgtagctgacttattcgaattgtccattatcaccttgacaggtttccgtacaagaataacagaatacaagagataccaacatctaatatgcacataaaaatattttaaagttttggaattactggaattacatcccggccattcttagcgtgtatttggaattagttcccaatgtcgaataacaagacaatatttttccaaagtgaaatcggctgttgatgtttggtcctcggagttgggctaggttaggtttatggaggtcgatttttttgaaagttgttaaaactggatgatttggttttgttttgcctttgtgattagtctataatcgcattaatgatgtaccgttggctttacttgaggacgagtatcgactggcgttttgtttttctcataacacgtactaatgggcactacttatcagaccttgttaaaatcactggcattcacctaacgtcttgtacatttttttccaaaacgaaatcggcttcaagggtgattggtccttggtgtatggctaggaaaagttaggtgaggttagggttagggcttttagtatttttgaaagttgaatggcgtgttgtttttacacaatatgaggactactggctgcacagcattgggcaaattactgtgacaatcggtcttgtctgttgacataacatatcatagcataacataacaaacacatgttcaaatttcattcagttttattgcattcattaatttatatcaacatgagttcagttacgcgtgccaattgctgaataaatgtctctgaaacatgttgcgtttcttctaggcgtttcaatgaacttaaatggtggcatcggcttgtaatgtttcttatgatccacctctctcatgaacctgtccgttatcccattatcgacaaacgacagtagtaaggtttgattagccacaatccaatagacccgttcgctgctcgcgacaaaagttttgagttcatccctccacgagtccacggaatagtaatccagtagaataactagcattttcgtatcatacttcgacaacactttctcatatgtcacttcaggatttgacaaatcctggatgaacagtttatgcatctttcgaatgtcgtcttcttcaacgaaaccgtacagctgctcttgtaggtactcgtcatggcattcactgagtgacagcaacttgtctatttcgttatagcgtagcttgtgtctgagaagcatgtctaacgttgcagatctccctctcagagtgtcgatgtcaattactttcgcatgcatcttgtagattcgataagctgaatggtagtcttttgcgtgttgctaataagagcgtataatagagactgaagctcaagggtatgtttttctggtactgtaccgaaaaataactttttcaatcatctgctttctgattggtcagtacaaagtaggcgtggtttacatgccatattctgattggtcgaaacaattttcgctagagggagtgtgtggatatgcattcttagtgtcattctgtatcagaacgatgaacagtgcagtctcaaatttactgagctcgctcatgacaaagagtcgtcacgaagcagtagaaggtttcgtcaagtacaagcgaagaggcttagtgagaagagcccagcacttgattcagaatatcgataacgtcgtaacttgtgtcaacatggatcgcggacgatacccttccttattcaagagtagcatgtcggcactatcgaaactgaacttgtgggaaaacgaaatcagagaggcgacgaacgaaacagatatgtcggacgtaatagctgctgcgagattccttttggagaatcaaggcttgctgagggatgaaattggtgagttgacactttgagatttgacagtttgaatttgaaattgaactcgatactttcactagctaatattgacttgtcgaatagaccttgtaacaacttttgtaaaacaactgacgttcgtttatgttttctgtttcagacaatatggacaaagcgaagaaacagatcacactaacggataccatcgtcataagcgatgaggacaatgacgagttgccagacatcatcagtccgaccatgagtacgaaatcaaaaagtccgataagaggcatcagaggattacacaagctaaaaccttacacgaggctttcatcaacggttgccagcagtacgttgagcgaaacggcttgggaaaagagggaacatgagctactgttggctcatcagagagcactgtctgaagcaaagcaagaggcaagggacgaactgatgctatgcataatatgcttgtctgcacaaaaagatcatacattagtgccttgcggtcacacattttgcgaagattgtgtcgatcagataaaagcaaagggcaagtgctgcttttgcaatgccaaaataagatcgagtgtaaaagtgagactgacagactaaatgactgacagatgctattccttcttgtcttatcatgatggcaataaaatgctaacatatcactttgctttgtttttactaataataggaggacaaaatcatatctgaagatatcatgcatcagctttgctagtaatacttaaacactttgaatgtcgactgttttgtcaaatttgtcttgtaatgctaaggcaatgggcatacaaagatacaactgctttgacatccagcagaagttcctcccacatcggtgtaggacaaaatgttcaacatcatgttatgtatcatgttgttttctttttcctacagagtggaatttggtttcctattgatcgaaatttggaaaacaattagcaacaggatagtgagaaaacgcttaatatcctgtaacgcaggacaaatgccagattaaaaaatgcttttagctattaacacattcgacccgcatgacgccttttcttgtttctgttggaacaggcattggtaaacttttaatgaaaaaaaaattattaaagggaaatgttatttttcttagtcccaataaagccggttgcacttcggttcagtcctcacttcagaatgaagagaaaacgagaacagatgactttgtggaaagccgcgtttgtcaacgggcaggaaacgttcaagtcctggattgacaaggtgcggatgcttgaattgaactgtgacatctcttctgcaagctcgacacattactctgatctgaacttgaaaacaaagtgtgccaagacagaagacaaatttatgtgtacttattctgtcggcattcgaccgacttctaagcagaagcgaacgttgaaccagatgctcaaggtgagcaactatgcttacaattggtgcaattacctagttaaggagaaagacttcaaaccgaagcagttcgacttgcaaagagttgttgccaaaacaaattcaacagacgttccggccgagtacagacttccaggagacgactggtctttcgacaacaagatgtcaggtatcaagttgaccgcctgtaagaacttttgcaccatgtacaagtctgctcaaaccaaccagaagaaaacaaaggtcgatctcagaaacaaagacattgttcagttacgcgaaggatcgtttgaagttcaaagcaagtacgtgagattgctaacggaaaaagacataccaggcgaacgaattcggcaatcgagaattgctttgacgccagacagtttttcgaaatcaaagaaggactggaaagaaaggtttctcaggctttcgaaaaatgtatctaagataccacctttgagtcacgacatgaaggtatgcaaacgtccgaatgggaaattcatactgcagatttcgtgcgatccaatatgtactcgacagatacaagtgcaaacttcagattcgatatgttcaatcgatccgggaggcaggacttttgcgacatgctatgatcctagcaatataaagacatttcaaatcggacctgaggcagacaaaaaggaaatcattcacgaatttcacaacaagatcgattatgttcaccgtctcttgtcgcatgctcaggagaaaaagcagacgcaagcggtgcaagacagaattggacaactgaagaagctgcacctcaaattgaaaacgtacgtcgacgacgtgcacttgaaactgtgctcgtacctggtcaagaattacaaactggtcgttcttggcaagatatcggtttcctccatcgtgcgaaaggacagacaaaaccatctccccaaaagcgctaacagggatttgctctgttggcagcactacagatttcgacagagactgttacacagagttcgtggcacggactgcgaagcggtcgctcaagacgaacggtacacttcaaagacctgtggtaattgcggtgtgaagaacaacaaacttggtggaaaggaaacgtttcattgtaaaagttgcaactacataactcacagggacgtcaacggagcgagaaacattctgtgcaaatacttgggactttttccattcgcagcataaggaaagaaaatgacaattgatttttcgggttcgattctatcccacttgactcgaagagtcagagggctcgaaggcattattgtcacagattttgccaatgcaagatctggggcaagaatgtctccgggtcaaaagagtcaagctggaaagattgcggggacaggtgctcaaacgcctttccatttccggtatatataaaaacacaatgctttgacatttctcatgtatcattgttttgaattacagtttctcccgtattggacaatatcatacaaagccagtgatgccatcataaattagctttcctattaatactaaaaaaaaactcgaatgtggacagtgttggcaaatttgtccaggtatacacgaatgcaatgttttaaaattccttatactttcatcacactgtcataggagaagtttctccctacattggacgctgaagtagaatgactttgctatcagacaagtagtaaaaaaatgttcaacaatatgtaatgcattactaatacaagagaaaattccaacataatcttgttttccttctgatcgaaatttggaaaaagttagcaacaggatagtaaagaaatgataactatcctgtgacgcatcaggacaaaattcacattattttcaaggccagattaaactaccggtaacatggatagacattcgatgcccttccccgtacatctaactgcggcgtccggacagttaggcaaccaaagagtgtattcgcacatctcattagaggaacgtcgtgcttccctttggcggggcaagagcatttaatccctgtccatgaatcctcgcagcgtcgggttaagcaattccctataccggcttcgctgcctcgccaaatatagagtcgggtgattacaaccaacattgacacttaacccatgccgatcagaaatccaaacaagggactaggaaaaaatgctcaacaccatgtaaggactaggaaaaaattccaacatcataccattgcatcgaaaagcatttcaaatctctgagtaacgttcgctatcatatagccttatggtcatgttttggcattctgatattttgataagagtcttattgagaggcattttgtaatggttttcacagatctttttgcaggttttttttctaaaagaggtaactctgtcattcttacgtatgcaagagttatcgctttatttgcattgagacgatgcattgtaaaaagagtatcagaggtttgtctgcatttcgatgcaatggaatgtagctggatataaaggctcgtggcaaatacaaaaaatgagacgttcaggaaagcaaaaatgatcagtcagaaatgagttttgtttcacaacgtgttgaaatttcgaagtactatacgccttatctaatatctcacaagtaatattctatgagaagtttttcaatttgactgtatttttcctaacgtgtcatgttgtatttcagaaatcagttttttttacgtgttgaagtttcgaagtactatccgccttatctaatatctcaaaagtaagattctatgaaaagtttttcagtttgactgtatttttcctaacgtgtcacgttgtatttgccaacgatccttacttgatgtatgatatttctccgagatgttaaaggccaaacttgtctgataagtacactaaataagcaaaggtacaaccagcgtgagtgaacttgttcattcacactggtgaatacccttatcttttagtattgggtatggacagtgtacccggcaaacaagtcggcatagtataaattcggacagacaggagaggctataagactcctgatacagacaaacataccaaaccttcatctcggagtacttttctacagtgactgttgttactattgataaatgaaaaagcaaactcaagcaatagtagtgcctcttttacgggcattgcctcttgtacgggcagatatcaacagaagaaaacaatacacgttaatacgaaatacatcagagtctatctctttgcttcttcgaaaataaaaagcacacatcactgttctgtcatcaaaaatgtagacaacactgtgagctcgttttgtcacacaccactgctgtaacatctttggcaggtcaccacttcacaacaatgctctgaaaataaaatgaaatagaacatcagtcaatcaattgttcatattttctatgtggaataacactgaaatgctttgagaagtttcttcactcttacaaaatctatgacaaaaatgttcatgtatcaagcatcaagctgaatggcattatacttgctgagtatttgtgaaatgcataccttatttttttgctgtggaaaatctgtcacacaaaacttcaatatgcttgtaaaacttgagacatcttggcctgtacaaatcacatcacagtgctgaaaaaataaagcaaagcattagaaaatcacagcttcttggtaactcattttgcaaaagtgcttatgcatttttacacacaatgaatgagacaaaattaagtccagaaatgtttccattatgtataactgagcatctcaaaaagcttggctagttcaaatgacaatcgacagtgatagccgaaacatgcattcagtgcctctaaaaagctgaaattattcctaattcagtccgtcaaaatgcttatttattcttctagaccacaaaacattgaacacagggtctagagattccaccttgtggcatgccataacgtatttcagacgctatcaatttacccggcttcggctggcagccatttttaatttcaatacaactcgaagagaaaaccgacctacctttgcatgcagattttgtctcctgttattgccatcccagtccatccttggtagttttcgacggcagacattctgagacgtaatttgtcataaagattgttcagctccctccatctgcaagcacaagaaaatgattttattccacagaaatacgttcgcgcgcaaagccattactcccgctccttgctgaacctagtttgacctcacgtttgaccccacgtgacccaggtcaccgcccagatttcggaaaatacggtctaattttagacttgggtttccagaaaaagtgcggagatggtgaacgacagggcaatttgaaatcgatgttttgatgtcaattctgatcgcagaaagccgaaaatggtctcattgtaaagcggagacatttgtctttgtggtatcaaattgtcagttgcgtatcttgtttactttttgcagaattatcgcccaaacatgtacctttgttgtcacggagcggccattttgttgtttaccgtggtctgtcttttctgagctagaaattaagtctttccctaagattgtaaattatgacacaattatcataaaacaagaaagggtttagctatagaatgagaccaagaacacgaatttacatcgaagattgaataagatattcacgtctgaaaatcactcattttcgtgcctgttttgacgaattccgtcacttttttcagagttaaaaatctgctagaccaaatgatttggaacaaaatctttgcatgcatttatgaggccaggtaactggctttctgattctaaagcagatattttttaaatccatgcattagaaaactacgacggttgaaagttgcaactttgcaaatggcgcatcattgttataccggtattacggtctgtcacttctgagctaaaaatcatctatttccagatttgtgtaaattttgacaaattaacatcgaaacaagaaagggtttagctgtcgaatgagaccaacaacatgaattttcattgagaaatgaataagatattcacgtttcaaaatcactcattttcgcgagcatttcgcacgaatttgaacaatttttcatggtaaaaaatatatataaccaagtgtttcagaacaagatttttgcatgcattcgttacgctagcgaacaggctttcttgtcctaaaagagatattttttactttcatgcgttaacaaaatatgagctcccaaaatttgacaaaaattgcatcatctctgcacaaaagccgttgcacgaaaaagtcaaaataaagtgtttcttcctactacaaacttatcaaagcaagaatatgtcattcgctgacataaaatccaccaaccttttcattttgttacttccaaatcgtccaaattattccataaagctccaaaactcagagagaactttttacttttattttgttcaatgcagttgtgactgccacgcactgtcagtatgtgtacgctgtaaattgatcaagaacgtcacagttgtttcgcatacttctatatgagaacttataaccagaaattcctggttattgctcagatctaactgttcattgaaataaaaaacaaaacaatgttgaatgaacagtatgagactttatttactgtactgtgttacatgtttcatagctaattcatgtagcaaaaaatatttattctatctccaatttcttacaatgtggtggtctaataataatgttaaaatgttcacgtagacattgtctgctccatccatcattttgggttccgtcctgatgttacaagtacaatccgaatttgggtccagactgtgctcacaccacccgagttctatatcagaatgataattactcatgtatttccttaacatgtacatccaggtagataacctcatatccaagtctgtccttatttttgctatgtcctcgtacttaacgtacagacacttctttgcagtcagaaaatcacgtaacgcacactctacatcaatcaaatattcactgtcgggtatgtttgagaagtccacagtcaaacttgtcctgttcttgatgtaggctgtgaataattccatccaagtttctaccgaaattccaagatgtagtctactaatatttgcttcgttaatcgacaccttgtgatgtgtcggacacgcctcgctcagtacagtactaaaggaattcgacattgtgttgaataccgccgagctattttccatcttgaacttatgaatgaatgtaagatgaactccttcctgacgcttatatactacatttctttaaaacattaaagatataaatctggactcgaaatatcgccctgcggcatgccaaacttctcctgaaaaaaatgcacacagttggcactgccttggaaaagtcagtattactggcaacagtgatgtctcttctactgtgtttgtaaaccaaggcggtgtccgaatgtctcatgcattcagtggtcatactttattatgagcaccgttttattgtaatcttttgcaaagtttttaatgtgctccaagtagatttccaatttcctccggctaatccgcatccgatattttctggaaaggcaatcgtttgtttacagaaaagcttaaagcttttgtaatatgcctggtataggcttaacaagcgtatttgtaagtagggtagatgtctttaacatctattttttctagtttattgtcttttatttcatgtaagttccatcgtggaattctgtacgcttctagtcttggcatgtggttgctaagtacaagtacttgacttcttgggcaggggcatactttacatccgaggcggatgtaacatccatctcgtagattttccaatgtctcatacagttgtttaggttgattaggttttgttaacttgtatactactaattgtccatgtctttgtgtgtgaggaaatttcttcttggtttcctcattgaggattgtagcattcttgttttttgacaggtattgacttaagtaagtagtgccgtttcctccttgtttatctactatccagttgactatgtagccatccttgttttgttcttgctgttgtagctgatgtatgatatcttgttgccatggtttaagtatttcttcttctgttggcatttcttcgtctgaaaaggaagggacttcaaactgtccagatctttcatcatgtggacggtcattaataatgtaagcgccatcttttcctgtatgcgcttcttgtggttttccacctggttttttcttaactttcaaaatacctctttcaatgagctctgcttctttttcttgtctgtttccgtgtccaattccatcatcagaatcatatatgtcatatgtatcatcaaagcaccatctgcagttgcatttgggtcctggacaatcaggatatttcctctttcgttgttttcgtagtttatcttgtgaatcttgtcttctatccatgttgtttgattttaatgaagacaacacactgctttttataatacttacgataagtcagtttatgcaaatattattttttatctttggttgaaactcaaccatctcattcatctctgttccaatgtatatcaccgctgatgaaggtttatttgaagcaacaagcgtgtactaaaatgaacgtatacccataaaaatacccccatttaaagggggggggtcttttttcagtcattttttcttcttttcccggacaaaaatcactctaaaacaccctacctgcccacacgaacatcctttgcaatccaactttttttcaaatcccattttggttatttgctgaaacatcgttaaaagatgcaaggatgtaaggatgctattgataaataaaacctaaaattatcaactgtttttgtaaaattcttgaaatagatatacttaataacttggttataacataatatacgttatgtattaacaaaacctgaaattaaagtagatccctcggaagcaccgaggacaaggttaattgtggatattgcacactcgatttgattgagaccgcattatagtggacgcaacttgaccccgatggttgacctttgtattataatacataatgaggcacaacctgttattgaaaaggagtgtacgtaaaacacgaactgcatgagaaagtggaaatatgaatttgtgtaattataaattagtgtattggaaagttttaagttttaactgatcaaatgtaagtatacatactttgatactgcattgtaaacaaactaatttcatataaatatacatggctaccctaatcgccctttatttctacaatgaaataaccgatatgaataatcagccgaaggtcaaccatcgcggtcaagttgcgactactatagctgtagttggtttattttgtacactagcagtgtacatgtatcacagataagttgcaatcatgctttgcacggaatgtcacggatcagagggacagactggctatattcatcactacagcaaactgtagggaatct

SEQ ID NO: 4887 - protein, 275 aa, Mercenaria mercenaria
MMNRSAAELLSTLMTKSRQQAMETFVLYKRRGLIRRAQNLIENIDNVVTCINLDRGRDPFLFKSSMSALSKLNLWENEIREATNDKDMPDIISAARFLLENQGLLMDEIDNSDRAKRQLLPTDIIAIDSDEAEEDDDDDLPDIISPTLMRTPTCTLKSKSPVKGIKGLHRLKPYSRPTSTVTSASSTSSTLSETAWEKKENEMLVAHQRELSKAKQEARDELLLCIICLSAEKDHTLVPCGHTFCKDCSHESKAKGKCFFCMAKEKSCVKMRLTD

SEQ ID NO: 4888 - protein, 463 aa, Mercenaria mercenaria; identical to SEQ ID NO: 597

SEQ ID NO: 4889 - DNA, 12373 bp, Mercenaria mercenaria
  source 1..12373: mol_type = other DNA
aaatacagttattgacttacaatgttatttataacatatcacatagcaaaacatactgttgactgacgtagtgttataaattcaaatgacatttaagtgttttttacatgaaattaaagggtcgtatattcaatgaactataaacttaccatcatgtcatatccataagcataagagcctggagaataaaagtcttcgtaaccccactgtccccagtttccgccattatatattttaaatgtgtctacaacgccctgttcttctaacaaattatgaaatggaataaaatgattttgtacagtaaattacagtaataagtttccgtagtacgcccagtaaactttactcaagttggacactataacgcaaattatgtactatccttgattcacagtatagttcttgaaaattgactaatctaaaaaaactattggccacatcacagttgatatgtttattaatgttaacagcctaaaatttaggtgaaatcaacacattgcaaaaatgtttttcatagttaaacgtattcaaagtttctatgttcatgagtaaaagttaaaattaataaatgaatgtcacaatattaattacaattgattcaagtaatccatatagtacaaattgatcaaataaggactgttccggctttctatatcttccaggtagcaaatcaatttacatgtattttaaatatacatgtacacaaaacatctatgtagtgctgcactgtcttaaaaggacaagatatagaaaaagtgaaacaccaatagttcgcccagttaaacagtacagtaacataacataaaagtcgcgccgaacgatctgaagagatcaaaatataacagtattgaatgtacgggtatctgtttttagactgatctatttgtgagttaacttgtacatatcgacgctcctataaacataacgtccagcaacgttaattcctgtataagccatgacaatttacatactagtacactgttctgttatgatttactttacgttaaataagtaatgaagatgtaaatgcaccgatacaggtaatatactaactgttagtagaaactgtagtaaaacttttaaatagaggatatttgtttgttttagtgtaagatcgaaatatatttcaccgagcgaacactatgatgcaatattttcacgagtggcgcaaaattatggtgttcacgagtgaaatatatttcgatcttacactgaaacaaacaaattttctatttatcctgtgcatttttaatggtttcagtttgcccgcgcaacgtcacgtgcatcgcgtcatagcgtgataatgtcctgacgtcaggatgtctttgtagaaaaattataaattgttctattacgttttctgatttctttgacattttattatgataaaatgtaaatatttatgatcattttaatatctttatacatctttaactttactgaagaatattttgcaaggaatttcctatcatttattattcatgtcttcgcattcgaatgtagccctgtaccagtgaaaaataaaaatacaatagaccgtgaaattaacacaactggtaaagagtatcgagatgtgttgaacatttcaaggagatgcttttttcaatacaaaatatatttaagcatatgtttcttgcatttacatatctcgtcagtgtgttcaatatgcaaaatccagatatcttttactctaatatgccgacagttcactgaaaacttaattctcaaaacactattttccccgagactttctttgaccagcaataagaaagtgactattccaagacttacaaataacttccccgcagtatttagtcaccagtaccttattaccactacagctaacaaataatatgcaacaaaattacgaatttttaaatgaaaactatatattccttcatataatttcacaagaaaaacaattttatgtaataaaaatcaagcgccatttacatgcatattccgaactacacacagagaaaagtaaaaccgtatacacgataggtttgaacatcactattgctatcgtccagttgtccgatgacagaaacgaccaaatctggtattatatatactatgcgacgtgctttaagagcagtctccataatgtcattacggactgttaaaacgataatgttaaattgaaagttaggatgaattgcccgtacaatgtcagattgccatgaccatacaatagtttaagtctgaaaacaaatacaacaacaacgtaaagtcgattaatctttattcataattaaaagccgatccagtgtttaaacaaacgactctcccttaaggggaatgtaggaatacttttcatgaagttccatatttgttccaccatattacaataaaaggcaaagcgtagtgattggctgtaaaaggcctgaacatgaaacatacgatgtgtttcgaataagcttataccatcatcagcttaacattttataatttaatttataatagtcgggaatgattatgtccaaaatataatgatgattgtaaataacatctccatacaaatcaggttgtgaaatatcttgtcgcagaaaagtttttagattactttaaaggggcctatgctaactgatttaattaatagttgcggcgatgaaatttgagcaatatttttgcccatgataacggcaccataatggtagacagtaatattacagactcagcatcttccttcttgttgatagtctcttcatcgtcatcttcatagattttgattttcctcttcttaggtttatcagcaaaaaaaaaattagcatttagatctctcaacttcttgttgatagtctcttcatcgtcatcttcatagatttcgatttccctcttcttaggattatcagcaacagatattgcttcgtttgacaatgtactatactgatttgcaggagcccatggtcttcctttctctataaagtctgcttgatgtctcgcagctttcttgccaataattcccttgtacttggtatgatatgaatctgctttgccaaactctaataattcatatctcttgtggagtgtagtctctctatatggacagacaaactgtacatatccgtgtatcataacatctattacagcgtaacagatatataatatttcttgtgagtctactaagctttgtagacaatcttctgtcattaacttcaagtcttgatctgctggatctaccattgctttgaatatatagaactccttcatcttctggaatttataagctgtatgatagtttgtaagcgtgttgacagtatgataacattcgacagaatgaagctcgatggtctatttccctggtactgtaccgaaaaataacttttttcaatcaatctgctttctgattggttaatacaaagtaggcgtggtttaaatgcgacattctgattggtcaaaacattttgagctagatatggcgtgcgcggatggtctaaactctcattctgtatcagaatgatgaacagatcagccgcagaattactgagcacattaatgacaaagagccgtcaacaagcaatggaaacatttgtgttatacaagcgaagaggcctcataagaagagctcagaacttgatcgaaaacatcgataacgtcgttacttgcatcaacctggatcgaggacgagatcctttcttgttcaagagtagcatgtcggcgctatccaaactgaacttgtgggaaaacgagatcagagaggcaacgaatgacaaagatatgccagacatcatatcagctgcgaggtttctcttggaaaaccaaggcttgctgatggatgaaattggtgagttgacactttcgaattgaacttgtacttgttttgttttagctgatagtgattgacttttttgaaataaccatgtaacatttttagatatgttttaactgaaattcgtgttttttcttatttgtttcagacaatagtgacagagcaaagagacagttgcttccgacagatattatcgcaatagatagtgatgaagcagaagaagatgatgatgatgatctaccagatataattagtccgactttaatgagaacacctacgtgtactttgaagtcaaaaagtcccgtaaaaggcatcaaaggactgcataggctgaaaccgtactcaaggcctacatcaactgttacaagtgcaagcagcacaagcagtacattgtcagaaacggcttgggaaaagaaggaaaatgagatgctggtggctcatcagagagaactgtctaaagctaagcaagaggcaagggacgaactgttattatgcataatatgtctgtcagccgagaaagatcacacactagtgccttgcggacacaccttttgtaaagactgttcacatgagagtaaagctaagggaaagtgcttcttttgcatggccaaagaaaaatcgtgtgtaaaaatgagactgacagactaaatgactgacagatgctattcattcttgtcttatcatgatggcaataaaatgctaacatattactttgctttgtttttactaataataggaggacaaaatcatatctgaagatatcatgcatcagctttgctagtaatacttaaacactttgaatgtcgactgttttgtcaaatttgtcttgtaatgctaaggtaatgggcatacaaagatacaactgctttgacatccagcagaagttcctcccacatcggtgtaggacaaaatgttcaacatcatgttatgtatcatgttgttttctttttcctactgagtggaatttggtttcctattgatcgaaatttggaaaacaattagcaacaggatagtgagaaaacgcttaatatcctgtaacgcaggacaaatgccagattaaaaaatgcttttagctattaacacattcgacccgcatgacgccttttcttgtttctgttggaacaggcattggtaaacttttgatgaaaaaaaaattattaaagggaaatattatttttcttagtcccaataaagtcggttgcacttcggttcagtcctcacttcagaatgaagagaaaacgagaacagatgactttgtggaaagccgcgtttgtcaacgggcgggaaacgttcaagtcctggattgacaaggtgcggatgcttgaattgaactgtgacatctcttctgcaagctcgacacattactctgatctgaacttgaaaacaaagtgtgccaagacagaagacaaatttatgtgtacttattctgtcggcatacgaccgacttctaagcagaagcgaacgttgaaccagatgctcaaggtgagcaactatgcttacaattggtgcaattacctagttaaggagaaagacttcaaaccgaagcagttcgacttgcaaagagttgttgccaaaacaaattcaacagacgttccggccgagtacagacttccaggagacgactggtctttcgacaacaagatgtcaggtatcaagttgaccgcctgtaagaacttttgcaccatgtacaagtctgctcaaaccaaccaaaagaaaacaaaggtcgatctcagaaacaaagacattgttcagttacgcgaaggatcgtttgaagttcaaagcaagtacgtgagcttgctaacggaaaaagacataccaggcgaacgaattcggcaattgagaattgctttgatgccagacagtttttcgaaatcaaagaaggactggaaagaaaggtttctcaggctttcgaaaaatgtatctaagataccacctttgagtcacgacatgaaggtatgcaaacgtcctgacggaaaattcatacttcaaattccgtgcgatccaatatgtacgcgacagatacaagtgcaaacttcagattcgatatgttccattgatccgggaggcaggacgtttgcgacgtgctacgatcctagcaatataaaggcatttcaaatcggaccggaggcagacaagaaagaaatcattcacgaatttcacaacaagatcgattatgttcaccgtctcttgtcgcatgctcaggagaaaaagcagacacaggccgtacaagacaggatcggacaactgaagaagcttcacctgaaattgaaaacgtacgttgacgacgtgcacttgaaactgtgctcgtacctggtcaagaattataaactggtcgttcttggcaagatatcggtttcgtccatcgtgagaaaagacagaccgaaccatcttggcaaaaaaggcaacagggacttgctctgttggggacattacagattcagacagagactgttgcatagagttcgtggcacggactgcgaagcgatcacacaagacgaacgttacacttcaaagacctgtggtaattgcggtgtgaagaacaacaaacttggtggaaaagaaacgtttacttgtgagtgttgcaattacaaaactcatcgagacgtcaacggagcgagaaacattctgtgcaaatacttgggactttttccatttgcagcatactggttgggaaccattttccggacacattttcatatttcggctccattaattcctaaaaatatatttgacataaatgaagtccacactgcacaaacttcagctccttccgcatccgatgttgtaatcagcatcgcgttgtgacgtaaaatatgggttccgtggggcctcaaatggggccactaaaataaggtatttttcccgccaggtaaaccagtttccggacaaatattttgacggttttttgttgttaatttgatatcaaaataagtaattaaactatttcaacacatttcttaatcacccatctcttcaaaattgcacttgaaacatgacccgacgttcaatagcagctacgaaagcaaaccgaggttgaccataaaaaatcgaatttcgtctaacacgaatccttgataatgtcaatagaaatagaataaaattagtgcaaaaatcgacagcaatgcatcttacgtaacatttagtgtgaaattaaaagtagaacaagttataagcagactatcattatgaagtttgattctttcttccacacttgatacctcggcatatgtgaactactgcgcatgcgcaatgctatcttcatgccccgttaagacagaaagttgttttgtaaacgcaggtgggttatcataaaaaacccaaacattatacagccttataaaacagtggtttgttgtagacatgaagaacaagcatctaaatgttctagataaaacacttacatgaataacaacgaaataaatcgtatattgcatgtgtccggaaagtggttctgtccggaaaatgattcctaaccagtaacgaaagaaattgacaatcaattttttcgggttcgattctatcccacttgactcaaagagtcagaaggctcgaagacatttttgtaacagattttgcaaatgcaagatctggggcaagaatgtgtccgggtcaaaagagtcagccacttcaaaagttcaaatcacaatcaacatactgagcagtgacagatgaaaacatacactaacctttttttcagctcctgtatcatgcatccgcctccttccttggtaggtttcaacggcaggcattctgagatgtattttctcataaagtttttttcagatcctccatctacaaacacaataaaatgattttatttcagagaaatacttgtgaccgttgaaagccatattgttattgttatgtccagctcctaaatgacgtgagtgatgacgtaacgaccttacgtgaccctattctcggaaaatgcaaaaaaaatgacgagaaatggtgaatgacagggtcatttcaaatcaatgttttgaacttattactgatcgcagaaagatgaaaatggtctcatttaaaagccaatacttttatcctcattgtattaaattttcagtttcatatcttatttactttttgcaaaattatcgcctaaacctgcacctttgttgtaacggcgcggccattgttgtttaccgtggtgtgtcatattctgagcaaaaaatcaggttcttccccaattttgtaaactgtgacaaattaacagcaaaacaagaaagggtttagctatcgaatgagaccaacatcatgaatttacattgaaaaatgaataagatataaacgtttcaaaatcacttattttcgcgagcattttacacaaattttgacaatttttcatgttcaaaaatatgctaaaacaaatgttctagaatgaaatctttacatgcattcaatacgctagcaaacaggctttcttgccttaaaagaaatattttttacattcacgcaatagaaaactacgaggtttgaaacttgaaactttgcaaatggcgcattaccgttatgttgacaatacggtatgacacttctgagctaaaaatcacatatttccacactttcgtaaattctgacattttaacatcaaaacaagaaagggtttaactgtcgaatgagaccaacatcatgaatttacattgagaaatgaataagatatttacgtttcaaaatcactcattttcgcgagcatttcgcatgaatttcaacaatttttcatggtaaaaaatatatataaccaagtgtttcagaacaagatttttgcatgcatttattacgctagcgaactgactttcttgtcctaaaacagatattttttacatccatgcaatagaaaactacgagggtcgaaacttgcaactttgcaaatggcgcattactgttatgttgacaatacggtatgtcgcttctgagcaaaaaatcatatatttccacacttttgtaaattatgccaaattaacatcgaaacaagaaagggtttagctttcaaatgagaccatcatcatgaattttcattgagaaatgaataagatatttacgtttcaaaatcactcattttcgcgagcatttcacatgaatttcaacattttttcagagtgaaaaaaatacataaccaagtgtttcagaacaagatttttgcatgcattcattacgctagcgaactgactttcttgtcctaaaagagatattttttacatccatgcgttaacaaaatatgagctcccaaaatttgacagaaattgcatcattctgcacacatgccgttgcgcgaaaaaagtcataaaaaagtgtttatttccactacaaacttatcaaagcaagaatatgtcattcactgacataaaatccacctaccttttcattttgttacttccaaatcctccaaattattccataaagctccaaaactcagagagaactttttacttttattttgttcaatgcagttgtgactgccacgcactgtcagtatgtgtacgctgtaaattgatcaagaacgtcacagttgtttcgcagactgctctgttttactgttattatacaatagttttatgcgccaggtgtaggctgcatttttcagtgctttcaaatattgatagttttctgacatttatactttgttcagaattctgaaaattggatatattggatatcatctagtcgtggttggagtgttgtaaatttaaggtgaatcataattgtgattttgaagttattttgatttttaaaaaaatcattattgcaattaaattgccaaactttcatatatcagcatagcctgcagcaataatgtgtttcagtgagcgaatatcaccgaggattatttataaaagatcagagttgcacaatattggacaattaccaagtgcacaaaagagacctaatcccatgattatcaaaagattgaaagagtttcgattaattcaatatagagggactcgaggtgggaaaaaccagattagacgagcatgggacactaacaatggggtaaataataacaacttgatacggataaaacctgaaaactgtacattagttcaggggcagaaaaacatcaaaatttgctccgtcaatacacgatcagtgaaaaaataaaacactctccatatgtgacttcatccttacaaatgaattcgacatttgtgccataactgaaacatggctcggtagctctgttgacaaagcgtgcatcggcgaactcgtgcccgactgttacaaaatgaaacatgtccctcgtagtggtaggcgcggcgggggcgtagcaattattcacaagagagccatacaagtgaacattgtcacatcaagcaaagacaacgaattttcccaatttgagtatatggattgcaatgtagttacaggcggacactccataggcctacggcttgccattatataccggccacccccttccaaagaaaacggtttaaacacaaatattttcctggagcaagaatggcccaatttcttagctaaatatgctacaattgacaagaccaccatcattgtaggggaccttaacttccatcttgatttaccggaaaatagtgacacaaaaaagtttacaagcagtctagatgcatgtggcatgcgtcaacatgtccaagaaccaactcatgtagctgggcatacgttggatgtagtgataaccagagataatgatgtcacggtttcaaatatcgaggtcatagatcctggactctctgattcaaatggaaagatgtcacgtgatcattttgctgtgatatttgacgccaaagcttccaaaccacccccagtacgaaaaactgtgtcgtacaggaaattacgttcgatcgacattgactcatttcgagaagacatacgaagaatagatttctttaacacacaatgcactccatctgatactgatatcgatgaatttgtggaggaatattcaaatcagttaatttctatagtagacaaacacgcccctttgactaccaagactattgtgttaagaccttcatgtccttggtataccgatcaactccacaaagcaaaacatcagaaacgaaaattagaacggaaatggcgtgaaagtaagctcacaatcgatcaccaaatttaccgaacacagtgtgctgaagtgaataagatgctaaaacaagctcgtgttgaatactatacaggcaaaattgactcatgtggcagtgatcataagagtttatcaaagattaccaaaaatcttcttggcgatacaaatcaggtgattttaccatcacaatcatctccacagcatctcgcacaagatttcagtgacttctttattggaaagatcgaaacaatcagaaacgatatagcatcgcaaacacaatctgtatctgatttagatgacatagaaactgaatacacaggtgtcaattatgtagagtttactcaagcctcagaagacgaagtgaaatcaattatcaaaaagtcagcgaacaaatcatgcgaactagatcctatcccaacatggttattaaaagaatgtcttgaaactaacaccagtgataacaacaattatgaatgcatctctagatgctgcgtatgtgcccaaagcgttcaaacattcacgaataagacctcttctaaaaaagccaagcctagattctaatgtcctaaaaaactatagacctgtgtcaaacttgccgtttctgtctaaaatcttagaaaaagtggtagatgttcgaattgaaaatcatctgaggaacaacgaacttcatgaagttaatcaatctgcttataaaaaattccactcaaccgaaaccgccctattaaaagttcaaaatgacattcttcaatcgttggataagaacaatgtgactattcttgtgatgcttgatctctctgcagcatttgacactattgaccacgggaagttgattcatcgccttgaacgtcactttggtgttacaggcaagccactcgcatggatgatgtcataccttagtgaccgctaccagaccgtatgcatagatggcgagctatcacaaccagtgctaatgaagtacagtgtaccccaagggtctgtcctggggccaaagaactacacaatgtacacaaaaccagtcggagctatctgcagaaagcacggactgaacaatcatttctatgcggacgattcgcagttatatcaatccttcaaaccaataaataaaatgtctattgaagagaccattcatcgcgttgaaagttgtttaaaggatatagtaagttggatgaatactaacatgttgaaactcaatgctgaaaaaacagaattaatcatattttcatctgaacacaagacacaatctgtttctaacatatctgtgaaagtggacggctctgaaatcaaacaatcaggcagtgtcaggaacctcggtgctttcctggattcgaacatgaggatggagcaacatgtgaatagtgtgtgtagaaattcctatgcacagttgcggcaaattagtcacatcagacaatatataaccgcaaacgcaaccaaatctctaatcaactctcttgttacatcacgtttggattattgcaactctcttctatatggaattccaaaacggtcaatgaacaaactgcaatatgtccaaaacacggcag

SEQ ID NO: 4890 - DNA, 14273 bp, Mercenaria mercenaria
  source 1..14273: mol_type = other DNA
acaaagaaggaaaaaaagtttgaacaaatattgttttaattagaatgaacacacaatatttattatcctattgaagtgttcgtcattcttttctctttacaaagatataaaaaatatttatctaaaatgaagaattaatgcttcccttggcgattaaaaaacatcgctctcagtctctgtttacggcatatagttactaaataaaataagcaaaaacctgtgatagtatcttattcttttccctgtagccactttattcatattttgagaatatttattatcctattgaagtattcttcagacaataaactttttatatatgtttttattttgaaattattttaatgtcttcttgcttccctagacgtttaaaagttggtgatttttgtaaaatttctttattgctcgtgtccgtagtatttccgaacgctcgcggaaactcacgaactcgaccgaagttaagctgtctatgatacagagagctgatggttacaaaagagtattattattgataggtgttatatttattatatactctgtagttactgacatgtatccttgacgaaataaggaaatattgtattgttgtattggtaattcttactgcatgcatcaatataaaagaaaaaaaagaaagaaatgtagagagagaagaaaggaaagtcataacaatttcatgagtgaaatttacacaattagaaaagaagctagagtatataaatggtctatattttactgcttgctaaaaattcataagacaatatgaactttgcaactatatatatttctttctaaaaacgatatagccactgtctcgtattttaaatattcgcataattatatttataccccttagtttaagttttaaccatatatatgttataaagaatttttatataatgcaaaattttgagtaaattgttttcggaacctctgaaacagccatattaacgcactatttgatagttgtttattaccagttaacagctttttgcaagtttattgcgtgtcaacgcctttttattaggagactaggggtgatcagatctttttattacacagataataatcttcccggtgattgcgtctatttaacagcattttaaaaattgtaacatgtttaatgaacgacactttaatacactataaatatataaaaaataattattttctaatcaacaacaaatgatgaaagatatataggataatgtgacagtgatttagtatttacttgtatttgatttactgtgtggatttgatgaaattccgtattttgtgttgaagtgtccaccagttatcgccattctgaaagaactatttcagttaatattcgatgcaggtatcattccttcaatttggcgaaagtctataatttgtcctatcttaaaggatgcatcatcagacaagagagtacccatgaactacagaggtattagtttgttgtcctgtgtgagtaaactttatactggatttatcaataaaagactgtgtcagtatctggaggaaaacgaaatactagaagatgaacaaaatggatttcgaagacacaggtcttgcgaagaccacgtgttcactttgaatgggataatacgtaacaattccactgtgttcacggcatttatcgacctacgtaaatgctttgtctttatcgatatagacatgatgctgtacaaattattgctaaatggaattgacgggaagctgtatacttctatcagaaacatataccagcaatctagtgcgtgcgttcgtgtgaataataagctaacagactggtttacatgtaccacaggggtgaaacaaggagattcggcgtcgccgaccatcttttcaatatttgcgaatgacctagtgaaggaggtcaatgaacatggtcttgggttcgaccttgatggtagaaagcttttaatgttgttatatgccgatgatatagtttgtatcgcaaagacagaggaagacctgcagcgcattctagacaagttacctgactggtgtagacgatggcgcgtactaatcaatactgataaatctaaatgcattcattttcgtcgaggtcgcgcttcgactacagagaagtcattcaaaattggtgataatgttctagaacttgtcgataattacaaatactttggtgtgatgtttcattgcaaaggcgattttactcagaatgctgacattctttctaaaagcgcgggaagggctcttggaaaagtcatatcacgattacgattactaaaggaattcggctgtaaaacctttgagaaactttatgattcatgtgttgtgctaatcatggattattgttcgagcgtgtggggatacaggaagttccagtgcatagacaatgttcaacatcgggcgatacgctactacttaggagtacacaggtttgctcctatattggctataactggagacatgggctggataccttcaaattacagacgttggactaatatgatacgttattggaatagactattattacttgacgacactagaattacaaaacaggcttttaatacggattatagaaactgtcgcaataattggtgcagtgagctgaaagatgttttaacaaaagtaggtcttatagaccatttcaataaccgtacagttatccaattaaacaaagcaaacacgcatataaggaactattacttaaatgcctggaaggaaaatgttataacggtacctaaattacgaacttacagactgtttaaaactgaatttaaaaaagaacaatatgtagatttaaatttaaaacgtgaacgatctcttcttgcacagttaaggtgtggcattgtaccaattcgagtagagactgggcgatatataggagaacgcatcgagcaaagactctgtaaatgtgtgatacgggactaattgaaaacgaaatccattttgttatcaactgtaccttttacaacaatttaaggttgcaatactttaatgacattactttaggggatatttacataagtatgagggactctgagaaacttgtatatcttgtgaacatttacccaagaagattagctaagttcttagtggatgcatatttaaagcgtaaaaattgtctgtttcactgataattcgtgttctatttttgtgtattaaacatttcttttatatgtatgacgaaagatgttctcgttgcactttgaattgtttttatttattattataacatgataatattataacatgataagactgcgtcaaactgtagttgctacagatgtattgataactctgttcacactacatctttatatatgttaaaatatgaggtgacttataggcccacagggccgggtgcaaataatttgttatatgaaaattgtattatttatttgtaaattgcacatgtcacgttaataaataaacatttacttacttacttacagtattttttcctgaatacaggttaattgttcgatactaaagtatagaaacatagaactttagagtgaaaatattatattgtaagttttccgaccacattgcgaaaaattgtcgtttattgatatataagtttattgtctcttctgaaaattattatgtactctttgtgctccatttatataatgctttcacttgctgtaggtattgcatttataagctttatgcaataaatcgaaattgaatagaattgaatgtacgcacagataatctcaaacagatatagcacgcgctaattttgaaatgaaaaatatgtaattcctagttcatatagtaataatatacgtgataattattatgaataaccttgctactacattagtgtcacattatcttaaatctttcttaaaagactttaaaaatctgacatttatataatcagtcagtcagtaacctttgagaaactttgggaagtcacaattcgcacatactttattacgtaatgactggctcggggacaaataggtcacacttcctattaaacaggtcctggtgtcataaatagataccttttttctgattttttttattagtgtttttcaaatgttcattacatagcaaaattagttttgacaaattaaatatgattaaatacaaataattgattaattagtttaatcttcatttcaattaaaattccattgaatgtaacaaaaaagcgtatttcacatctatttattataactgaaagtgattgataatatttaatgcaaaataaaagaataaaataacgtaatgtcttctatttttcccttctgtattttacattaatgaaaaacagaattaaactaaattgttacattgtgcgtaactttgtaaatataaagatgactatatttgttgttgttgttttatcggtacttaaaattggtgtaaaataaattcccccttcccacgtttttacagtagatctctaagatcctagttatttatgatcggcacctcccgtgatatgataagcggagatcgccgaaccataacggactgcaacactcgctaaaaatatctgatagtgatcgatatctagctagacgatctaagagagacaactatgtatagcgttgatctcgataaacaaggaaagataatagaatcgatttttacccaattcttcagtatgctacaggtctaatgatttatgtaaggtgttttctaatatgaacacacaattacagacgatttttcttaacgtatgttatcgacagttaataaagaatgaaattataaggaatcttggctatacgaccatatacgtgaaataaaagtggcgaacaggtttatttttgagtcgacggtctacatttgtagcaaattcattagtcaccatgttgaggtcgcaaatgtagcaatgtcctggtgttagaaccatggttattgtttaacgcattcaaccacatgaagccttttctcgtttctgttggaacaggcattggtatttttttttttttttgatgaaaaaaattattaaagggaaatattatttttcctagtcccaataaagccggttgcacttcggttcagtcctcacttcagaatgaagaggaaacgagaacagatgactttgtggaaagctgcgtttgtcaatggatgtgaaacgttcaagtcttggatagacaaagtgcgaatgctggaactggattgtgatgtctcgtcggcaagctcgactcaatagacatttacggattaagtctacgtggactgtgaacacctaagacgatcgatttttcaaggggaccgtctcaacatcataattttaatttatgtttggtaggaaaacattcctataatgatagtaaggtctggcttaatatgtcactgcacaggataatatttggatttgtctgtccgtccatctgttcgccagagaaatgttttgttatacatatcgcaaaaagtatttgatctagcgtcataacactttcctgaaatgttcttcaataatataagttgcgcatctgcgacaaagttgaaaagatgagctaatctgatcgcaatgtatccgtattccatcgtcgtcgtcgtccaacatgaaaaaaaaactgggtcagcttgggatcaaaatgtaggtcagaaggtaaaacattgtgaaaactgtagaaaacgtaatatcttgcgtctccattcctttgttgttattatacgcccgaagggacgtattttgggataccacaggtgttcatctggctgtctgtctgtttgtctgtctgtccgtctgtccgttaacaatttcgtgtcgactccgctccttgaaggattttaaacaatcttgaaacaaatgttatccacatcaagaggacgttcagagtgcctgtatcaggtggcttgctttaaggtcaaggtcacacttagggctcaaggtcatatgactttgtttcgtgtccgctctgtaactcttgatctgtatgagggattttaaagacacattgcacaaatgtcaaccacatcgagtcgacgtgcagagcgcatgttttggatggctagatacaaggtcaatgtcacactaaggggtcaaaggtcatataactttgtttcgagtgcgatgtgtaactgttgaactgcttgaaggattttaaagaaacttggcacaaatgttcaccacattgagacgacgtgcagagcgcatggctcgcttcaaggtcaaggtcacacttaggggtcaaaggtcacatgactctgtttttgtgtttatgttgctttgcattgcggtgctcttggttttatttggcatatccattttttgttcacttacaatattttttttattgaattacttcccttttatgttactataaatatgttattttgtaacatttttattactggccgtagggaaaaaaccgataccacttttctgtggtacaacatggatggtacctgcaaagttaaggtgtattttgacatatctgtacctggtaatgattttagtggacttagagtttttcggggaatttcttccctttgttgtccttttcgtttgggtttcaacagtaaagttctttaatttttgctcctatccccggagcacttgttatttctgtattagccgcgttaaagactttgtattcgtataactttattgttttaatttgtcagtagtgtatggacgaagagatggacagcttttttactagataaatgatagtaacagagatatttgcctttatcaaaaactttaaccaaaaattctaagttaaaaagggacataattctaacaaaattccaaatcagagttatggggattgtttctacgcgtgtagacttaaatagtaaattagtgttttaagattcaagtcaatagctttgatagtaacaaagataaaaattaacagaaaattcttaattaaaaaggagcatatttctgtaaaaatacaatcagagttatggggattgattttccttgtgtagacttcgatagtaaagaagtattttaagtttcaagtcaatagctttgatagtaacagagatatttgactttatcaaaaattttaaccaaaaattctaagttaaaaaggggcataattctatcaaaattcaaatcagagtaacgcagaatgtttttcctggtgtagacttcgatagtaaataattattttaagtttcaagtcagttgctttcatagtaactagagatatttgactttataataaaatttaacagaaaattcttaattaaaaaggggcataattttgtaaaaattcaaatcagagttatggggattgttcttccttgtgtagacttcgatagtaaataactattttaagtttcaagtcaatagctttgatagtaacagagatatttgactttatcacaaactttaaccaaaaattctaagttaaaaggggcataattctatcaaaattcaatcagagttatggggattatttctcctggtgtagacttcgatagtaaataactattataagtttcaagtcaatagctttgatagtaacagagatatttgactttatcaaaaactgtaaccaaaaatgctaaattaaaaaggggcataattctgtaaaaattcaatcagagttacggggattgttcttccttgtgtagactttgatagtaaataaatattttaagtttcaagtcaataactttgacagtaacagagatatttgactttatcaaaatttgtaacccaacggagacgccgacgccgacccctacgccggagcgagtgcaatagctctactttttcttcgaaaaggcgagctaaaaacaggcacatccaaatttatatcacctaccgcatagtgatgatataataactcaaaccctattgccgttataaactctttttcatatcgcgcataatataattaaactatgttgagacggtccccttgaaaaatctatcgccttaggtgtccacagtccacatagacttaatccgtaaatgtctaatactcagacttgaatatgaaaaccaagtgtgctaagatagaagacaagttcatatgtacatattctgtcagcattcgtccgacgtctaagcaaaagcgaacgttgaatcagatgctcaaagtgagcaaccacgcttacaactagtgcaattaccttgtgaaggaaaaagacttcagatcgaagcagttcgacttgcaaaaggttgtttcaaaaacgaattcgcgcgacgtagcaaacgagtagactttcaggagacaaaaagatgtcgaatatcaagacaacggcatgtaggaagttttctgccatgtacaagtttgcgcagaccaaccagaaaaaagcaaaagtcgatctcagaaagaaagacactgctatattacgcgaaggatcattcgaagtgccgagtaagtacgtgagattacttactgaaaaagacataccagacgaacgacttaggcaatcgaaatagctttgatgccagaaagtttctcgaaatccaagaaggattggaaagaaaggttccttcgtctttcaaagaacgtctctaggataccacctttgagtcacgacctgaaagaatacaaacgtccgaacggaaaattcgttttgcagattccatgcgatccaatatgtaagcgacagatacaagtgcaaacttcagactcgatttgttccatcgatccaggaggtagaactttcgcgacatgttacgaccctagcaacttgactgcctttccaactggacccaaggaagacaagataaacgtcattcacgaatttcatgacaagatcaattgggttcaccatctcctgtcgtgcgctcaaaagaaaaagcagatgcaagctatacaagacagaatcgaacaactgaaaaaactgcacctgaaattgaaaacgtatgtcgacgacgtgcacttgaaactgtgctcctacctggtcaagaatttcaaactggtcgttctgggcaagatatcggtttcatccatcgtgagaaaagacagaccgaaccatcttgccaaaaacggcaacagggacttgctgtgttggcaacatttcagattcagacagagactgttgcacagagttcgtggcacggactgcgaagcgatcgctcaagacgaacgctacacttcaaagacatgtggtaactgtggagtgcaaaacaataaactgggtggaaatgaaacgttttattataaaagttgcaactacaaaactcatagggacgtcaacggagcgagaaacattccttgtaaatactttggacattttccatttgctacataatacaaatgacatttgctttatagggctcgattctttgccttctcgatgcatttagttgccacagattttgcaaatgaagtttctggggcaagaatgtattcgggtaaaaagagttaaaagcggttccttatagacatttcaaaataagtgtatggacttgtagccaaacatgaaaccaaataaagaaaaaacaaacaaagcagtttaatgttttatcattgtattgtcatcataacaaggcaaaagaataacatcagctagctaatactttagtctgttaacctcattttcacacacgattttactttggctatgcaaaagaagcactttcccttagctttacttttatctgaacagtctttgcaaaaggtgtgtccgcaaggcactagtgtgtgatccttctcggctgacagacatattatacataataacagttcgtcttttgcctcttgcttagctttagaaagttctctctgatgaaccaccagcatctcattttccctcttttttttccaatccgtttctgacaatgtactgcttgtactgtttgcacttgtaatcgttgatgaaggccttgagtacggtttcagcctatgcaatccttttatgcattttacgggactttttgattttaaagtacacgtaggtgtcgcattaaagtcggaccaaagatatctggtagatcttcttcttcttcttcactatctatcgcgataatatctgtcggaagcaactgtctctttgctctgtcactattgtctgaaacagagaagaaaaaaacgaatttcagttaaaccatatctaaaaatgttacatggttatttcaaaaagtcaaatcactattagcttaaacaaaaaaggtacaaatatctagttcaatttcaaagttctaactcaccaatttcatccatcagcaagccttggttctccaagagaaacctcgcagccgatatgatgtccggcatatcttgtcattcgttgctctctgatctcgttttcccacaagttcagtttggatagcgccgacgtgctactcttgaataaggaaggatctcgtccacgatccaagttgatacaattaactacgttatcgatgttttcaatcaagttctgagctcttcttatgaggcctcttcgcttgtatacgactaatgtttccattgcttgttgacggctcttcgtcattaatgagctcagtaaatctgcggctgctctgttcatctttctgatacagaatgagagttaaaagcatccgcgcacgctatatctaactaaaaatgttttgaccaatcagaatgtcgcatttaaaccacgcctactttgtattgaccagtcagaaagcagattgattcaaaaagttatttttttggtacagtaccgaggaaatcgacacttgagcttcattctatcgaatgcaatcatactgtcaacacgctatcctacaactcatcaattctacaagatgcttgcgaatatcatcagcatcgaaacactgagacagaggtctcaaactctggacatgctgttatcacataacgacgaagacatctacgacaagacagaaaagacactgttgctcagtgaatgtcacgagagatactttgaggaacaaatgtatggcttcctcgaagaatatgacacgggatttttacatatgctttttctggcggacttgtcagatccggcaatgaacttcgaattcattgtatcaacgtatgatacccggttgctactggtattactggactgctatgctgttcaatcttggagaagtgaattccttaactttgtggcaaatagggagaaggtgtactggctagtgtgcaatggactgttcatgttctcatttgttgatcatggaatcgtagatcgattcatcagagacattgatcgtaaaaaacattacagacctatgccacagttcgtgttttatcaaacgtcacgaagaaatgcgaccagttttagagaaatttatgcagcaattggcatgcctaaccgcaataaaagtacattaacgtgaatatttgcttgttgtattttaacgaacaagactaattgtcacagcaatttgctcaatgctgatcagtcagtagccttaagtttgtaaaacagccagaccctagccctaaccttatctaacttttgctagttcctcctaggaccaatcaccataaaagccgatttcgttttgaaaatatactccaagacagtaggtcaatgccggttatattcccaaggttagatagctaatgccctttattacatcgtcgcgtgagtggaacgatgctctatctaccattttttaaacgtggcgaaaatcgcttctaaagtttaactcttgtctagtttctttatttctgggcgaaaatggtgataaatatatctgcttgttcattgcgcttagttctttcagactgtaaatgcttttaaatacatttcgtttttacttttctgcatttatacatttttcactttggagaaaaaaaatgttaaaggtgtattgctctatcgggagatagagcactgtgaatttacaaaattggacatagagccagataatatttattaaacttgtatattgaaaatagtgcgagagctgttaaacagtaatgacagtcactgtactcattttaaaattaaaggaggattggatttggttttagtattatcaaactgacacgatatcataggccatattgcaactttcaagattttctttgaggaggaggactctagttggcacgcgcggatacctgggtatatgaccttcttcgtgtcaactagatggcctcccctcatgaaaaagctagatttcaaacagtggtgaggggcaggtgttcaaagtcagaagatttggactgatttgcaaaggttttaccatgctgtccgtactgttcagggttaactgaactgctacgctatagacttaatcggctattaaactaggcacattaggtcctacttatttgcagatgggtatttgtaaaccatatcgtagtattatgttaaacagaaagattttgaagtttaattactcagtaaccggcatcattattgtcagcaatgaacaaagatctaaaatcttttttagtcgtaactattctatttgccaattacaacttgcttttcattacgctgagtaagattttctgtgttttgttatcagttggcattaaggttgatataatgctaaacattataacaatacctaatgacattgtctttgcatctaattattctcagtaataactgtattctttcacaaaacgacagtttttatattatgttcaaattttgcatgtaactgtacttgtcagtcataccagttctcttttacacaacacaatcaatgttatattcatgtctcttttttagctattaaaaaaggttgattgtacggcgtccatcgtccgtcttcctgcgtcaacattgtacttattttttttctcctctgaaactactggtcagtagaatttttgggaagatttgatcaaatgattaatcttggcccctttaagggcagctactgccagctagagcaaaaaaaataaataggaaaaacatttaaggaacttctcatgaaccgcttgatagatctttaccaaacatagtctgtagcatcattataacattctctcccaaactggttcagatggggacgattggccctttttaggggttaccatagctaaaattggaaattcccttaaatgatgttatctcatgaaccacacaatggatcttcttcaaacttgatttgtagcattattataagaatcttcgccaaaattgttctgttaggggcacttggtctgttagagttcaaaacagaaatacctttaaacgactactcatgaaccatttgatggatattcaccaaacttggtctagagaccagtataaggtcctttctcaaatttgtttgattaagggcactttgtccctcttaggggcaactagagctacaaatataaatatattctggtcatgaatcgctggatggatcttcatcagagatggccggtggcatcattagagggctctctctcaattgtattcaaacggagactgtttgctcattctagggctaaaatcaaaaatatttttaatgactacttctaatgaaccacgcaattgactgtcatcattctcggtccgtagcatcattatattgccctctccattttttttaattgtgggttggggtgggggagcgcatggccctctaagggaccactagacctaaagctacaaatacaaacttttattaggtcctttaactaatttattcaattagtgtggcctcttttaggggctgctagagttgcaaaatagagataccttttactaaattcctctctaactcctgaatgggtcttcataaaaccttgtccagagcatcattataaagtcttttaccatgttatgtcttatataaaatctattcaaatagggacactttggccattttagggaccactagagttgaaaaagaaataacattagattatttctttcgatggttatgctttggtgcgtgacagcaaaatgataataaaaaataatgaacaggttaaaggattttcaccaaacctagttagaagcaaagtcagatggttaaggttcagttgaaggacttaggcccatttaggccacttgttaacttttcacacaattaaattaaggctcaaagatattacatcgcaaataatatgtcccggtcatacctttcatactaatcttattgtatatattccatttagtttctgcatgttgttctcaaatctggtggcatacatttcaacttaatgcggagtatcataacaagaattcatagcatttattttgcaactaaacatgtgcagtcacagcacacatgtttcatctttggtagagttacatcatgtgatactttaatagttttgtggcattgattttgatttacaccaaccatttgtaataactgactacttacaattctaagaaacatatatatctattctctctcacaaacgcaatcgttttttttttatattccttacagtttctcttcatgtacgtactttcatttagtgaattgaatttcagcattgcattccttgtttgatatttga

SEQ ID NO: 4891 - protein, 275 aa, Mercenaria mercenaria
MMNRSAAELLSTLMTKSRQQAMETFVLYKRRGLIRRAQNLIENIDNVVTCINLDRGRDPSLFKSSMSALSKLNLWENEIREATNDKDMPDIISAARFLLENQGLLMDEIDNSDRAKRQLLPTDIIAIDSDEEEEEDDDDLPDIISPTLMRTPTCTLKSKRPVKGIKGLHRLKPYSRPTSTVTSASSTSSTLSETVWEKRENEMLVAHQRELSKAKQEARDELLLCVICLSAEKDHTLVPCGHTFCKDCSHKSKAKGKCFFCMTKVKSCVKMRLTD

SEQ ID NO: 4892 - protein, 478 aa, Mercenaria mercenaria
MKRKREQMTLWKAAFVNGRETFKSWIDKARMLELNSDVSSASSTHYSDLNLKSKCARIEDKFMCTFSVGIRPTSKQKRTLNQMLKVSNYAYNWCNYLVKEKDFKPKQFDLQRVVTKTNSTDVPAEYRLSGDDWFFDNKMSSIKLTACKNFCTMYKSAQTNQKKTKVDLRNKDITQLREGSFEVQKLFVRLLTEKDIPDELVRQSRIALMPANFSKYMKDWKERFLRLSKNVSKIPPLSHDMKVCKRPNGKFVLQIPCDPKYTRRIQVHTSDSICSIDPGGRTFATCYDPSNIKTFQIGPEADKKEIIHKFHNKIDQVHRLLSYAQKKKQTQAVQDRIGQLKKLHLKLKTYVDDVHLKLCSYLVKNYKLVVLGKISVSSIVRKDRPNHLAKSANRDLLCWQHFRFRQRLLHRVRGTDCEAIAQDERYTSKTCGNCGVKNNKLGGKETFICESCNYKTHRDVNGARNIMCKYLELFPFAA

SEQ ID NO: 4893 - DNA, 21046 bp, Mercenaria mercenaria
  source 1..21046: mol_type = other DNA
gtcacactttgagatcaaaggtcaagaggatttttttcctgtccggtctataactttgtcatgcaaagcaggatttagatatcagttggcacaattattcccctggatgagacaacatgtcatgcgcaagaaccaggtccctaggtctaaggtcaaggtcatatttagaggtcaaaggtcaaattcaagaatgactttgtacagaacatttcttcttcatgcattgagggattttgatgtaacttggaccaaatgttcaccaccatgaggcacccttgtttttagaattacgtcccttcattttactataaatagattttattgtaacttttttgttactggcggtagagaaaaatcgagaccacttttctgtggtacagcatgcatgttacatccaatttttaggtgtattttgacctatctctacctggtaaagagtttcttgtggacttatattatatagatttttttttttttttttttttttaaagattaatttccctttgttgttactataaataacttacatgataacatttttataatcagccaaaaaaattcaatatgaaaacagctataggtttttatatatataaattttaatccaagtgttttgttataacatattgtatatatagtacaatattgtttatacatcattgacagatatcagttcattatgttatactgcagtagagaaaattaggtgccttccagtaggggactttgtattgcatggcaatacttcattcacttgtttctgctgttttatagattttctttttgttaactccttatttattccactttattgtatgttcattaccttataaaacgggtcattggattgtattcatcaggatttacagctgaaaatttcaagcttttcttgaagtatcgtttataacaatgccttgtataaattgaaaactgcatttacatcatgctcacgggtttcatgccaggcttttgatatcacatgttgggtgcgacatgccatcaggctttgagttgcgtatttgacatcccttaccattccccgtttctgttaatttccgaagtgatatgtcataaaagaaacctaatgaacacccaagtgtatctaatagtgtattacaacttgccaattgtgccactcagacttttatatcagttaaaatatgagatcaaggaatggcagctttggactttggaacgcatgacattattttcttgatctggttaagtgatacttcaggccataattacaaaattgttcagtttgcagtgctccgaccgacccatcgaaaaagtcctgacccaaaaatttttataggcagtccaggggcgcaaatttttatatatatttttttttatcctttctgatgccaaatgcaatatcagcaaacgttttcctttccttatttaaatatacagcagatcattcagcatttagtgtatacgatcgtagattaccgccttcatgcgtgtttcagaagtcataagttacgatccgagaaagtcgctcagatatcttgtcttaggtcttcttgcatgttccaagatattttacggtgacctatgcatattcgataaacgattttccaataaacaatgtcgtctgacacgacgccacggacctgctgaccaatgagtcaatcaacatgactacgacagaggttctttttggaaagtacccattttaacaggtaatggtactgtccaaattaaaagctggacaagttcattatagaaatttagcaaagtatattgtaagggttaagataacataagataaatgggaaagtttgttgatgcttttttacatggattgatgcagcaaaaaaattaaaaatcttaactaaaagatactatggataattcaacttgaagcatatttggtgataatacttcagatgatcaagctatattctcatttgtaagcctgaattactgatgaatgcagtccagattttgttcagttttcttgctatatctaatcatgacattagactaaatgtatagtcagaaatggttgtttttattttttgctcaactaattgaagaataggtagagctgttggactcaaccattcgttggcatcagcgtaacagtttggttaagtttttgtaagtaagctggtatctcagtaaccactagtggcaatggattgaaacttcacttattcactgtcacaaaatgtgttacaggtatatagacacttaataggaaaatggcacagaaaaaatggtagtcgcataatggcatattcaaataattctccatttttttgctctgtagagctgttttccttattttctttgcaattatttgctgacgtcacatgacagatctatgcttgacatttaggaagcattttcttaatgaaatgatagcttgacagaatttgtcatggaatcttaggtgtctcattttttagctgcttttgcagtttgtgtgtttgactgaaaatataatttttgcatcaaacatagcccccacttgtatgtaagctggtagctcagagcccaccaaagggattggattgaaactttacagccttgaccactgtgatgagctgagatgcattgtacaggttccataactctgttttgcatttttataaaatcccccttttacaacttatattcattcagttgacaaggccgttgattagtcaagaattgctgtcctcagacagctcttcatttgtgtgtgaccactgttctgttaatattttcatcattatcattgtttttaaatcacattactaattcattttgaatagctttactgtatgcatattttatttacagtaacttataaataccaaaacctatagtatacattacttacttataaataccaaaaactatagtatacattacttaccttaatttactgcacatctacactctgaattctggtatatcaaacaaacagtaaacaacgcaaaggattaattctctcatgattcatttactgcacatctgcactctgaattgtggtatatcaaacagtaaacaatgcaaaggacttaacaccctcatggttcaatttctgcatgtctttactctgaacagtggtaaaacagacaataaacaactaatgggtctaacacccacatagtagaattcttcacgtgaggaagccatccagctggcttgcggaaggtcggtggttctacccaggtgcccgctcgtgatgaaattgtgcacggaggggcacctggggtcttcctccaccattaaagctggaaagtcgccatatgacctaaattgtgtcggtgcgactttaaacccaacaaaataaataaataaataaataacacccacatagttcagttattaaacatctgactccagagttgtagaaaatcgaacactaaacgatgcagaggactaacacccttgggataatcgtttactgtacatctgaatgccgaattgtggtatttaggacaataaacaatgcgaaaggactgacaccctcatgggccaaatgctacacatctgaactatgaattgtggtacatcaggctgtaaacattgtgaaagcctttgtcatttagttattttaaacgtgaaatgtgtacatttctgtgaagggagcaatttgattaaagtccttggataatttgtagcagttgtttattgtcatgtttaaggattaacttgactttgcctgaatatctgtgccttgctagtacttgaattgtgatatatatgtatttatatgcagcttgggtatacaatgtttataagtaaactgttgctggtaaaagctttaaggtattgttaattgtttattgatatgcttagtttaaacaatgttactgttgaatcattaatatttgcgggggactaattttcatgcatttcatggtgtgaaaccacgaaattacaatcccaatgaacaagtaaaattccagttcattttatgttcaaaatttgaaattcacgaattcatgtcctcaggaaatagccatttttggctcgaaccacgaaatgttaagcccacgtataaggagttcatcaagatgttattaattgttgttattaattgttatatttcagtattctgcatgaaagagatggaataaaatgcagttcttttattaattgtaatagttttgccttgagatatgttgacacaaactttgttgtctttgacaatcaggcttcatgaagtaatttcttttacaggttacaactgttacgtttgttctgtgcagacacctacaaaaactcttcttttttctgtgaacaaaacagaacatgcctatacttcttgcatatgttatggtgtacatgaagactgatatatattgtttaaactgaaaggtatctgtacagtctacatatttctaaaggtttgtcctagccaggttaaaattctgcaaagtataaatatttacacctagacagatttttgttttgataagatagaaatttgataatttgaagacagtcagaggtgtgttaaacttttacatgcatgtatatcactacgcagctatataggcaacaagtatattgctgtcaaacgatagatgagccgtgccatgagaaaatcaacatagtgggtttgcgaccagcatggatccagaccagtctgcgcatccgcgcagtctggtcaggctccatgctgttcgcttttaaagcctattggaattgaagaaactgttagcgaacagcatggatcctgaccagactgcgcggatgcgcaggctggtctggatccatgctggtcgcacacccactatgttggttttctcatggcacggctcaaattaaaatttctcatgcaaatacaaaatgtactgcattaacctcttgaaaaacacgtgtcttgtgataaaaaagtatattgctgtcaaaccataaatttctcatgcaaatacaaaatgtactcttttgacctcttgaaaaacatgtgtcttgagattcaatactgttattttaccagtaccttgaactgcaaacgagtggattttaccaggctgggtcatttgaggtgcttgctttggcaaaatcgatgtgtgacaaacatcatagcagatcaaggtactgttttttgaccctgtacatatttctagtgttacctaaaccagaagggactaaaatttgtagacagctgagactaattacacaaaaatgataacggtgaacattttgacacatggaatattaagatgccatcattgcatcattcctggcgtcatatttggtgtcatgactataaattggctacttttccatatcgatgtgtgatgaatacaaggttttgtatttatatacctaaataaattctgtaaaaaaattcggcttgtatttcacaagtaaatatgaacaagcagaaaaaattctattttgtaccttttgaattgtacgtttccggactactttcattaatatgcatgacctgacacagttgtatactgaatagcgcacataaaaacttcactgagttcaataacaaaacaacaaacaaataataaaagggtcattataacagtagctagatctgggatattgtattcggctctagttgattttgcaaggtcggatcacactcggtgcttgcgcgcctcgtgagatccaatctggcaaacatccactttagccgaatacagcatcccagatcgagctactgttataaaaaccctattttattagtcaagtacaaggtgtatttcagacagagaaatcgaaggtatataattaaagccatttctaggtagggctgcttgctgattgttttcagaacttgtggctcatcctatccgtgtttgttttactttgttgtataaacttgcaaggagtatatttatttagcaataaaaatggtaaaaccaatacagtgtttcagtgttctggtgaaaaaaactttacttctgcatctccaacgtgaaacacagtagagtatgttcctccaaaacgccaatttcacaatattgtctatgaacttttacagtttagtcataaatggaggtaatcgacaacaaaggactatataatatcaatacctttgacaaataaatgacaaaaaaattatcaaaaacaggattttaaaagaaattaaaaagacttgatgcttataacaaaaactgtggaagtcaaattttcagcaaagccatcttgacccgtaatccgtaacatccgtaatgtatcaaacacaaatggcgaattcgttggaagggcaagggtcacacaatgagatcaaaggtcattttggaaatattttcttgtacccctattaaccataatgagacaatatccaaaattcaaggtcttgtctgttcaaggtcaaggttgtatgatgagatcaaaggtcaaatagatattgattatttttgtgcccccagtcatcactaccctattctctccacacagcccgcccgcttagctcaatagggagagcgcagatctacggatcgcggggccgcaagttcgagcctgggcggggcgtatgttctccttgacgatttgataaaagacattttgtctcaaatcatttgtcatccagcgctgattcatgtggagaagttggtagttacttgcagagaacaggtttgtactggtacagaatccaggaacactggttaggttaactgtccgccgtcacataactgaaatactgttgaaaaacggcgttaaacccaaaacaaacaaacaaaaaactctccacaaaaacaaacaaaaaaaaactctccacacttcgaagaagagatattatattgttttgctcattgttggttagctggcccgttttataaacctttggttttcgagcactttggcccattatgtttaattttaataggatagttgccactatatgatccctattgtttttaggttaattagctcaaagttcagtcacagtgattttatttgttttgttgggtttaacgtcgcagcgacacagttataggtcatatggcgactttccagctttgatggtggaggaaaaccccaggtgcccctccgtgcattatttcatcacgagcgggtacctgggtagaaccaccgaccttccgcaaggcagctagatggcttcctcacatgaagaattcaacaccccgagtgcggttggaacccagatcgacgaggggcaagtgatttgaagtcagcgaccttaaccaccggctgtcacagtagcatagagacttaaattggtttcggctcaacagaagaaggcttaagcttacgtacagtcttcaaactaaaagaatgatttctgtgatcagtaaatgtttttgttcctggagtcagcaggtcaaaggtcaagagtttaaaacgtttttttctgatcagtaactaatcagagaattctttgacatactggcatgggacttcaacgaatggttgcctgtggccagtagataacccctcgtgttttttgataggtcaaaacacaaaaccttgaggctgaagctatttacactcaataagtaaaacagttgtcaaaattcacaggatgattgtctttggttcgcccaccttgatggagatgtccctcgggcgacatcttacgctgtctatatatgtcacaactttatgcaagagcttgctcaaagttagaagaatttaatggcagaaatcttcatatattttaacaccacaagcctctttgtaggttgcacagatttagaaagtcagcagtttttaacacacacgggtttatttacaagctgaactatactaaaaatcgatccaggtataaatacattagctgcttacatagtttttgtcccacgccaaacttttaaataattaatacttctaagccgaaaagttctatgttacattaacctaacaacccctctgtctaacccgatctcatattgttcaattatccgattccatttttgtaaacatttctaatttctttaattctatcctcatgataatgattccgtctcttcttagttaagtctccttctttctaagcattttctctgagtatacccttttcacaaactgcatcgcaataacgtgtttcaaaatatttatagcaatttcaaaaacagatcaatcaaaatgtccattatgtactcatataaccttaaacaagatgtagaatcaatcaccattgggtattttcgtaaaaaaatgactggtaccgaaacaaacaaattagggtcaaatctaatagacaaaacattcgactgtgatacactttgctaaaattctaaacaacaacaatatgctgaggaggtaaataaagtaattaacatttttgaccaattaatgaaaatttcatcgaaaacaacataaaaaacaataattaaggtcaaccaaatcagtatctgttgagaacttcgctatatcttaattaccggttacaatagtaaacaaagtcatgccaaaacttaatggataaaacattccgaccttacgaaatttgctacagtagaacaccaacaatgatctaaacatgtaaacaaaatgaatagtattgtccgtaagtattgtccgtaagtattgacctggcactaatgaatagtgaaatcggctcttgatgcatctggtcctcgatgaagggctaggttaagttaagcgaggtcaatttgttaaaaaaaaaatgttaaaaaaaaactgtgaagttgttctaaatttgtcttagcgataaaacgataaatacagtaattatgtaccgtcagttttacttaaggctaataatcaactagctttatgttttttcacaacatgtaacgaggggcattaactgtctaaccttgggaaaattaatggcattcacctacagtcttgaacatttttccaaaacgaaatcggctttggtggtgtgtggtcccaggtgtatggctaggaaaagttaggtgaggttagggttagggctttgagtatttttgaaagttgaatggcgtgttgtttttacacaatatgagggctactggctgcacagcattggcttgttcgttaaaatacaacaaggcaaatattcaagtttatgtacttttattgcggttacgagtgccaatcgctgcataaatgtccccgaaactggttgcatttctttgtggtgtttgatgaaacacgaacggtggcattggtctgtaatgttttttacaatcaacgtctctgatgaacctgtctgttattccatgatcaacaaatgagaacatgaacagcccattgcacactagccagtacaccttctcgctatttaccacaaagttaaggaattcacttctccaagattgaacagcatagtagtccagtaataccattagcagtcgggtatcatacgttgatacaatgatttcgaagttcattgccggatctgacaagtccgtcagaaaaagcatatgtaaaagtcccgtgtcatattcttggaggaagccatacatttgttcctcaatgtatctctcgtggcattcactgagcagcagtgtcttttctgtcttgtcgtacatgtcttcgtcgtgatgtgataacagcatgtccagagtttcagacctctgtctcagtgtttcgatgctgatgatattcgcaagcatcttgtagaatcgatgagttgtaggaaagtttgtatgcgtgtttacggtatgataacattcgacagaataaagctcaagtgtcgatttcctcggtactgcaccaaaaaaataacttttttcaatcaatctgctttctgattggtcaatacaaagtaggcgtggtttaaataccacattctgattagttaaaacattttgagctagttgacactgttatactgacaaagttttattaactaataaacatacaaaaatgaattacatagttctctttagtttgtcctcttgaatgttgtatatgatccatctgtcattggacatcgttttcgtgttaggtttgaagttagcaaagcatactactttgggtggatcaaagtagtatgcttcacatttcctgaacaatattccatcctttagtaactccaagaagtggtagtttatgtgttcggcttgcgacctcgcatagtccatgattactattggttcttgattgtacgcatatgataggtcttttgtcctacggttctcaagtatgattgcaccatggtgtgccatcaggtaatttcctaagaaggatttgcttacgttacctttttcttcccataaccatagtatttgtctgtcggtttgtctttcgatgagttccaatgctgctttctgccatggtctcaaagttacgtttctaagatccaatatcattttgtcgactatgttttcttctctgaaggcctcaaatatttctttgaatacatgcttctgagctggtattaaactgcaatatggaaagtcagttggatcaagttcttgagttccacgtttttttgcatagatgtatgctctgacattcaacgataggtagctgatgtccacgttagagtagattgtctttgtgtcttccttagacacatacttgatgcagtctttgattttcttcactcgttcaatcatgccacagctaaacttgaactgtctcttccatttagctttgaaagttttgaagttcatctttttctttgtttggatgtaagcatggctatgtgccttttcttctcgttccgataatccaaactcgttgcagaagacatagctttgtatgaagttttgatgcttcttgtttctagagtccattcttctcaggaagagatacttctttggtccttggttcatggttaacaagaagtgtacgcctttgttggtgattttctttttctttttctttggtttttcaactttaacaccagtattttttaagtgcattttggttttacaatgttgagaccatccagatttacgtacttgacgtttgcacagttcacacattttcgtctgtccgttgtttttgaacggcatcttgaatgtagaatcgatgagttgtatgatagtttgtatgcgtgttgtcggtataattgcattcgatagaatgaagctcaagtgtcgatttccctcgtactgtaccgaaaaaataacttttttaatcaatctgctttctgattggtcaatacaaagtaggcgtggtttaaatgcgacattctgattggtcaaaacattttgagctagatatggcgtgcgcggatggtctaaactctcattctgtatcagaatgatgaacagatcagccgcagaattactgagcacattaatgacaaagagccgtcaacaagcaatggaaacatttgtgttatacaagcgaagaggcctcataagaagagctcagaacttgatcgaaaacatcgataacgtcgttacttgcatcaacctggatcgtggtcgagacccttccttgttcaagagtagcatgtcggcgctatccaaactgaacttgtgggaaaacgagatcagagaggcaacgaatgacaaagatatgccggacatcatatcagctgcgaggtttctcttggaaaaccaaggcttgctgatggatgaaattggtgagttgacactttcaaattgaactagatatttgtacttgttttgttttagctgatagtgattgacttttttgaaataaccatgtaacatttttagatatggtttaactgaaattcgtgttttttcttctctgtttcagacaatagtgacagagcaaagagacagttgcttccgacagatatcatcgcaatagatagtgacgaagaagaagaagaagatgatgatgatctaccagatataattagtccgactttaatgagaacacctacgtgtactttgaagtcaaaacgtcccgtaaaaggcatcaaaggactgcataggctgaaaccgtactcaaggcctacatcaacggttacaagtgcaagcagcacaagcagtacattgtcagaaacggtttgggaaaagagagaaaatgagatgctggtggctcatcagagagaactttctaaagctaagcaagaggcaagagacgaactgttattatgtgtaatatgtctatcagccgagaaagatcacacactagtgccttgcggacacaccttttgtaaagactgttcacataagagtaaagctaagggaaagtgcttcttttgcatgacaaaagtaaaatcgtgtgtaaaaatgagactgacagactaaatgactgacagatgctattccttcttgtcttatcatgatggcaataaaatgctaacatatcactttgctttgttttttactaattctgaaattcaggtttaaccactactccctgcacttatcatgatactatgcgatctcaaacttgagacttataatttgatctcagagtagacaattgaccatcagtttgaaatactttcattaacagtatactagcatatagtaaaaagtcactatgatttcgctcttcagaatttagtgaaaagatacattatgaaaaaccaaatgcatttatcagttcatgctggatatttgtatgccttgacagaaggacacatttgtgcaaacttggccttacaagccttttacatgaacaccttcaaaaatgaccattgcttttgctttacaattaaatcatgtcgattaggatatagcttttcttaattaggcatctgtgctctttggcaagtaaaaatattgtgtccaaattacaagcttgaattgacatttcgtttttcaatattaagctaatcggacatcggcctgaggtattagccgacgtattcgttcggcattgcaatatgacctttaaaaaatgagcagtaccaaatttccgtggctctgcatttaacgggcttgccaccgtcatgtttccaagtatcaccatctgagaattcaatgtagttgcttactaaatgtagttacattgagattcaccgaggtttatactggaccatggctgcattacagaaatttgggatagagtaccaaatgatagaagaaacagagggaagaagtagtgtttcgaattttgaacgatcagtatctctgccagacattgtcatgcttgtccccgaacacctatcgttacactcggacgacagggctgttcaaaggtgatagcgagcgtctcgatagagaagtgtagctcttccaaagaacgtggtacgcacatgttatatctgacagacaatcgtagcaatgatgggccaagtaattccccgtactagcgtcattgcctactgagcacagagtcgggctttagccatcattaacgcttgacccacgctgatcgtttgaatgccaaatagcgagtgtgtgtgaaaagaagtaagacagaggaagaagtagaagccaaattcgcattcaaattgaccagatcggtatattcgcaagacattggcatgccagtccccgaacacctttcgctacacttggacgaaagggctgttagtaggtggtagcgagcatctcaatagagaagtgtagctcttcctaaaaacgtggcactgacatgctatgaaatgcaaacaatcatcgcgatgacgggcaaactaattccccgcaccggcttcattgcctaccaagtgcggagtcgggccgaagccagcattgacagtttacccgcgccgatctatgaaagtcaatctgaatgagaactttcggttgccgttcggtccattagtgtttttgattttgattgtttgaaataagataaagagatttgtgtttgtcaaagttttgaaatttcgacatgacatacaccagagtcgggcttaaaaattaagtttttgtactaggatggcgttgcaagcttgtcataagtaggcaccctttggcatacagagctggtttgtatacccgatctagcaatcttagcggacatcaaaagaccagatcctgtcactagacggggagattcctactttaccaaacttgtaacgcctcgtgatggccaaaggcggttccttatgctactgcacatcaccctacactagcataaagttggtctaacgacacctccatacctttgactgtcctttttttgttttgcctaaacttagcccaactctagcgatatcggttgccgttcggtccattagcattagtaattttgatttttgtttttatgaagagcaagagaagagagaaaaaggttgcatcgttttatgtgcagctgttaaatgccaaatgagctgtacacttgatacaacaataaatttgaagctttgatttttttcaattacaagtaagagcttatgtttgccaaagttcagaaattttgatgtcacttatgttatcatttagcagtgtgagcgagccaagagtcgttttcttaaattagctaaacaagtaaggatatgaaaacgccccttgccgtactccaccaccaatgataaaaagtgacaaagccctgtgaagagaaacacattcaatagctacaataagttgtgcacaactttaagacattcgacccgcatgacgacttttctcgtttctgtcggaacatgcattagtgaaactttcgatgaaaaaaaaagtattaaagggaaaacatatattctcaatctgtataatttctgttgcacttccgtttactcctcacttaagaatgaagagaaaacgagaacagatgacattgtggaaagccgcgttcgtcaatggacgggaaacgttcaagtcatggattgacaaggcacgaatgctggaattgaacagtgacgtctcgtctgcaagctcgactcattactcggatctgaatttgaaaagcaagtgtgcaagaatagaagacaagtttatgtgtacattttctgtcggtattcgacctacttctaagcaaaagcgaactttgaaccagatgctaaaggtgagcaactatgcctataactggtgcaattacctagtgaaggagaaagacttcaaacctaagcagttcgacttacaaagagttgttaccaaaacaaattcaacagacgttccggccgagtacagactttcaggagacgactggtttttcgacaacaagatgtcctctatcaagttgacggcctgtaagaacttttgtaccatgtacaagtctgctcaaaccaaccagaaaaaaacaaaagtcgatctcagaaacaaagacattactcagttacgcgaaggatcgttcgaagtgcagaaattgtttgttaggctgctaacggaaaaagacataccagacgaacttgttcggcaatcgagaatagctttgatgccagccaacttctcgaaatatatgaaagactggaaagaaaggtttctccgactttcgaaaaatgtatctaagatacctcccttgagtcacgatatgaaggtttgcaaacgtccaaacggaaaattcgtacttcagattccttgcgatccgaaatacacgcgaaggatacaagtgcacacatcggactcgatatgttccatcgatcctggaggcaggacgttcgcgacgtgctacgatcctagcaatataaagacatttcaaatcggacctgaggcagacaagaaggaaatcattcacaaattccacaacaagatcgatcaagttcatcgtctcttgtcatatgctcaaaagaaaaagcagacgcaagccgtacaggacagaatcggacaactgaagaagctgcacctgaaattgaaaacgtatgtcgacgacgtgcacttgaaactgtgctcgtacctggtcaagaattacaaactggtcgttcttggcaagatatctgtttcgtccatcgtgagaaaagacagaccgaaccatcttgccaaaagcgctaacagggacttgctctgttggcaacatttcagattccgacagagactgttacacagagttcgtggcacggactgcgaagcgatcgctcaagacgaacgttacacttccaagacctgtggtaactgcggtgtgaagaacaacaaactcggtggaaaggaaacgtttatttgtgaaagttgcaattacaaaacacatcgagacgtcaacggagcgagaaacattatgtgcaaatacttagaactctttccatttgcagcataaggaaagaaaatgacaattgattttattcgggttcgattctatcccacttgactcgaagagtcagagggctcgaagacattttctgcacagattttgccagtgcaagatctggggcaagaatgtcttcgggtcaaatgagttaagacttaacaactaacatctaagacataactatcatatctaaacatcttaacactattcttatactaaggttgcaaaggtcccgtcgctctcgtttcaaacaacttgtcattgctcctaacatgcaaaaaagctgaaggaaaaaaatgtggttcgttaattggctatcgcattttctggcgatctgcaaaagcactgaacgatcaacaggtgaccatgtctaccgtcaatatcggaaagcagcatcaacatgatgcaagactcaaacagtagacactcagacgacctcgagagtaagtatatcaactcgagtgtcatttcaatcaagagagaactccagctattttaagctggaaagatattcgccactattgcggggacaggagctcaaccgtctttccgttgtcggtatagcgagtctcctcaccctaagtggttacgccgaacactggacattctcaattgatcgaaaccccggatcaagttctagccgaaccaagacttggcatcgctatgccaatgtgcgttgccagtcttatgacctaaccaagtcctaacatatgcatttcgagagcgacgcgactttgccatagtactcaccccaggcattcttcatctgtcttgtactgcacataccacgaataacactttcaaatccatacttgaacattttaacacaagaaaaaataaaaaaaaaactgacgcggaaacaccttgaaattttggtgaaatccgcccgaccaactgaacaactgagcttgtgcagccgcttttaaaggctcgcctgccgaaaaataacaaactgtgacgtcacgaacgatttgattggctgatagctttaaaattagttttgtcccacaggacgagtctacacaaaaagtaactagccaatcagcgtcgagcattttttcctcaagttttaagtggtcacatgaccaattgtacagccgtcgagagcagacgtgtttttgcattgctctcgctagttgtgtgacaacatgaaatggtttgatctggcaaagactgacatagtcctaggtcccaaagtatgttcacagtacttgaaatggccaatgccaagttttccttaaatacttaaaaacaacatgtatggaccatattaggagatctgtctctcccacattagacagattcgtatagtgtcactgatgctgtttgaccaaacatgaaatcctacatataatgtaaaactctcaaggtgggctgttttggaaagtttgtcccgtacatacaagcatacaatgctttgacattcctaatgcatcatcacgttgtaataggacaaaatcatatctgactagggtcgccctttagctgccacaaggtaaaagggcggaaaagggcggtcatgttctccattgaccaaaggtaatgggcatacaaggatacaattgctttgacattcaggagaggtttctcctacaagatcgctttgctagtactactataagctatgagcatcagcattgctagtaataccataaaaccttgaatgtctatcaaggatacaatgctttgacattcctaatgtatcatcacgttgatgataggaggacaaaatcatatctgactaaggtcgcccttgagatgcacaagttcgatagagcagaaaagggcggtcatgttctctgttgtgaaaaacttgacgacgtatgaaatgtctcaagcatacagtattgaccaaaggtaatgggcatacaaggatacaattgctttgacattcaggagaagtttctcctatcagatcctaaaggctgggttcaatgcattacatttgacattccaaatgtatcatcatgttgtaaaaggaggacaaaatcatagctgacgctatcatgtatcagcttgactgttttgtcaaatttgttctgtaatgcaaaggcaatgggcatacaaggatacaattactttgacatccaggagaagtttctcctaccagatgctaaagactacgtacgtttgatgaaaacaatgtaggagaaaatgttcaacatcatgttatgcatcgtgttgttttatcctactgaggggaattaggagaaaagcatagtgaccttttgcattgatggcaatttcagggattgtaggagaaaaaatgcattgggacaaaattccattatcatgttgtttgttttcctactgatttagcaacaggatagtgagaaaaataattactatcctgtgacgcatcgggacaaatttccaacattatgtagtgtaatacgatttcattgccagatcaaacactagaatgttagggatcggtagcatggatagacattcgatgcccttccccgtacatctaactgcggcgtccggacagttaggcaaccaaagagtgtattcgcacatctcattagaggaacgtcgtgcttccctttggcggggcaagagcatttaatccctgtccatgaatcctcgcagcgtcgggcaaagtaattccccataccggcttcgctgcctcgccaaatacggagtcgggtcgttacaaccagcattaacgctttgcccgtgccgatcagaaatctaaacaatggaggaaaaactgctcaacatcaggtaaggactatgatacaattataccatcatgtaggattacggttggatgtaggataaatttccaacatcatactgttgcatcgaaaagcatttcaaatctctgatatagccttatggtcatgttttgacattccgatagcttgatactagtcttgtaatgattttgcattacaacttactcgatagtttgataagagacatctctaggattttgtaatgattttacataatgttcaagttatcgcattgagactatactttgtaagtgctatatattttcaataccaagagtaccagagatttgactgcaatttcgatgcagtagcctgcggttggatatatgaagggctcggtgacaaagataaaatgagacgttcaagaaaaatgatcagtcagaaatcaagaattttgttgttcaaaagtgttgaaattttgaaggaccatctaccttataaagtatctcataaagtatagttaaatagtataacatgtctcattttatctttgtcaacgacccttacttgatctaattatatgtatctccgagatgtgatagaccacacttgcctactaagtacacttaatacacaaaggcactaccagcatgagtgaacatgtttactcacactggtgaatgccagtgtctcttaacatttcattgggatagcatacttagcaaacaagctgacaaagtattaattgcggacacacaggacaggctattggactcataatacagacaacaacactaaaccttcatctcggagacctttaccattactttttatactgaaatacaacaaacacaataagcaaaagtgtgcctcttttacgggcatagccacttgtacgggcaaagttcatcatacaaaacaatacatgtaaatatcagagtctatcatttcaattgtaaaacgtctctccctgtttgcatcaccaccatcacagcatctggtctctgctctagctacctgtaatagaaaaaaatataagactaaatggcatttcaaatatctctcaagaaatatgctgaggaaaatctatcattgcatctgtaactcactgttcatatttctttattttttttgtgcatcacacaaatcaaatgtaaaatgacacttgatactgacagcctccagtatagaaaattataacaaaaagttcaagcatcaagctgaaatggtattgtatttttttttaattcagtatttgtaaaatgaatagctacctgatttttcttcacaagttgctagtaaaagcctgtcacccatcacttctgtttgaatgtacaacttgagacatcttggcctgtgcaattcactgcagtgcactgaaaaaacaataagcaaatcattagaaaatcaatgcatctttataattcattctgtaaaagtgcttatgtatttttacacacaatgaatgagatgaaatttagtctagaaatattttctgaacatttctgaaagctgagctagttcatatatcttcaaacagtgttagattttcaagttttctgccttacataaattcattacaaagtttctacagccttacactgtgatgaagctgaaaaggcattatgtctgctaaaattcaatagagaatttttgtaaaataaatacctgcttttctatccataatttacagctgtggaacacacacacacatcacttcagtatgcttcacacttcttcagtctatgcttgtaaatattttgcaggtctggacatgttgctctgaaaaaaaaaataagcaaaacatcattctatcattgattttttgaagattcattcagtcaaagtacttattaattttttatatacataaaatgagacagaatctggtctataagtatatttaatatgtacaactgagcatctaagaaagctaagccacttcaaaagttcaaatcacaatcaacatactgagcagtgacagatgaaaacattcactaacctttttttcagctcctgtatcatgcatccgcctccatccttggtaatttttaacggcagtcattctgagatgtattttctcataaagttttttttccgatcctccatctacaaacacaataaaatgattttatttcagagaaatacttgtgaccgttgaaagccatattgatactgttatgtccagctcctaaatgacgtgaatgatgacgtagcgaccttacgtgaccctattctcggaaaatgcaaaaaaaagacgagaaatggtgaatgacagggtcatttcaaatcaatgttttgaacttatttctgatcacagaaagatgaaaatggtctcatttgaaagccaatacttttatcctcattgtattaaattttcagtttcatatcttatttactttttgcaaaattatcgcctaaacctgcacctttgttgtaacggcgcggccattgttgtttaccgt

SEQ ID NO: 4894 - DNA, 11532 bp, Mercenaria mercenaria
  source 1..11532: mol_type = other DNA
gttcgcacttgtaatagacaaattaagactcttagtgaattatgaaataagtttatgaaagtcttttcatgttttagtacaggcgtggtttgatttaaaattaatctacaagtatgttcacgagtattaaattgaaaattaatgaccaagatattaggaacctctttgatcacacgaatgttaaatatactgaaagagattataccacacacatgagttaaattgaactttcagagattatgaaatttaatatgatttgtgcttgaatatctggcaagcatttcgttacaaaaaaaatggcagataagcaaacgtaaaacattttgttgaatgtacgtcatttttgagatagtatatgatactcattagcataggaacaaatggattacaaatgagtaatgagtgagttatttctataagtaatattgaaactaaccacttattacaataacttactatatcgttttaactgaattaaaatttagggataaaaaatcatttttgacctcaacaaataacgcttctttcaatttgtaaagaaaaataaacaacttcaaaacaaaagtctataaagttatataactgactgagctgtttgattcagataaattaatctaatagtatgttcttaattgtaatttcttataagcgcttttttcagcagtatttcatctatgtaacggtggacagttaaatgaaccagtgttcctagaatttaaaccagtactttcctgttcttcttaagtaatgaaatatgaatcagttttaaacaacgaatgatttcagacacaatgtccctcgcctcgggaatcgaacttgcgactctgcgatccttagatctgcgctctcccctttgagttaaccgggcgagcagtttcggttactttctatttatactgatactttctatttatactgatacataaaatagattttatttttacatttttatccattattcttcaccaagatctattactttcaattaaacttaccattcaaagtctagaccgtcactgtacttgacaaaactaaatacatttttttcgctttaaaaatattatatatatttcagaaatcacacatttaatagcatagaatgtatgtacgggtggacggatagctcagtggtttgcacactggccttccaatcctgaggtcggggattcgatccccggcagctactcgggaatttttagtaacgcttttcagtgtttcccacccaactagaggtgtactggtcaggaacacaggcaacccttgcgtgtatcagtgctatacactgggcacgttaaagaaccaggctgtctattcgcaacgagctaggctaagtaagtcggacaagcctgtacctgatttctaatctctctgtcatgggggctttgtctcactctttccctctggtcagatcgctctgtgtctgtactggtagaggatgaattatgcgccctgtgtggctgcatttgaactatgtaaagcgcctttgaacgtgaaattgatcatgaaaagggctctatataaatctggtataataataataataatgtataccgtcatgacaagccataccaacaagctgatgtgtacatgtatttacacttttttcacacatttatcaacccaatatgtccatttcaaaatcggctgttgatgtgtttggtccttgatgaagggctaggacaagttgttcgagatcaatttgtcaaactggatgagttggttttattttgcctttgtgaaaaactatactcacattaattacgtaccgtcacttttacttaaggctaattgtcaaccggcgttttgctttttcgcaacatgtaacaaggggtattagctatctaaccttgggaatattaccggcattcacctacagtcttagaacttttcgaaagtgaaatgggctgttgatgtgtttggtcctcggagttgggctaggttaggtttatggaggtggatttttttgaaagttgttaaaactggatgagttgggtttgttttaagtttgaatgtgattaaactataatcgcattaatgatgtaccgtcggttttacttgaggacgagtatcaactggcgttttgtttttctcataacacgtactaatgggcactacttatcagaccttgttaaaatcactggcattcacctaacgtcttgtacattttaggtaagggttagggctttgggtatttttgaaagttgaatggcatgttgtttactgcacagcattgggcaaattactgtgacaatcgatcttgttggttgacataacatatcatagcataacataacaagcacatgttcaaattcagttttattcaattcactaatatgtatcaacatcagtttagccacgcgtgccaatagctttataaatgtccccgaaacacgttgcgtttcttctaggcgtttgataaaacacaaacggtggcataggcctgtaatgtttcttatgatcgacttctctcatgaacctgtccgttatcccattatcgacaaacgacagtagaaacgttgcattagccacaatccaatatacccgttcattcctcgcgacaaaggttttgagttcatctctccacagttgtatgtcataatagtctatcacaagtatcaagaatctagtatcatatttcgacaaagctgtctcgtaattcacaaaaggattcgacaagtccgtaatgaacagcacatgttgatgttcgatgtcgtcgtctgaaagaaatccatacagttgttcttccaaataactctggtgacatctgctgagcaacaatgtatgctctgtctcgttgtaattctttttttcgtcatcttcgtttcttaatagcatatccagagttcgagatctctgtctcagtgtttcaatgctaacaatgttcactttcatctcgccaaattgtttagaagaattattttgcatcttgacagtttgagagctgaagatataatgaagctcaagtgccgatttccccgatactgtaccgaaaaataactttttcaatccatctgctttctgattggtcaatacaaagtaggcgtggtttaagcaaaccgttctgattggtcgaaacaattttcgctagagggagtgtgtggatatgcattcttagtgtcattctgtatcagaacgatgaacagtgcagtcgcagatttactgagctcacttatgacagagagccgtcgacaagcaatggaaacgtttgtcttatacaagcgaagaggcatagtgagaagagctcaaaacataatcgaaaacatagataacgtggtaacttgtatcaacttgatcatggacgataccctgccttattcaagagtagcatgtcggcactatcgaaacttaacttgtgggaaaacgaaatcagagaggcggcgaacgaaacagatatgtcagacgtaatagctgctgcgagatttctcctggagaatcaaggcttgttgacgaatgaacttggtgagttgacactttgagatttgacactttgaatttgaaattgaactcgttacatttactagctaatactgacttgttgaattgaccatgtaacaatttttttgtaaaaggttcaactgacgttcgtttatttgttctgtttcagacaatatggacaaagcgaagaaacagatcacactaacagacaccattgtcataagcgatgaggacaatgacgagttgccagacatcatcagtccgaccatgaatacgaaatcaaaaagtccgataagaggctctgtacacaagctaaaaccttatacgaggccctcatcaacggttaccagcagtacgttgaccgaaacggcttgggaaaagagggaaaatgagctactgttggctcatcagagagaactgtccgaagccaagcaagaggcaagggacgaactgatgctttgcatcatatgcttgtccgcacagaaagatcatacactggtgccttgcggtcacacattttgcgaagattgtgtcggtcagataaaagcaaagggcaagtgctgcttttgtaatgccaaaataagatcgagcgttaaagtgagactaaccgattgatacttttgcttcgttgtgatgaaagatgataatacattggaaataaaatgttcagaacagtgccgtgtcttactttgtcatatagtaatgcaaacatagcaatcccacttaggttagagagattttgaaacaatgtcctaatccagactcggtatgtcatcatgtttctgtacaagtgtacaaagaacactgtcacgaatccttatgattaaactttttcattatagatacgttcacgccttgagaaatataatacgcatatgtcaactcatactggagaaaacgttgcatgaataatgagccttgtatgtgttatatcaatttctgtcgtggtaagaaaaacaagccagtttgctaatcaccttaaaaagcagtgatttctttgtttttaagtttgtatcaatttcaaagcaaaatagatggtgtaaactgggcatcaagggtcttcggcatgtgaaaatatcgtgtccgattctctagtatgaactgacatttcgtttttcaacattaagctaatcggacatcggcctgaggtacgagccgacgtattcgttcagcatcgcaatatcacctttagaaaaatgtacagtaccaaatttctatggctctgcatttaacgggcttgccaccgtcatgtttccaagtatcaccatctgagaattcaatgtagttgcttaataaatgtagttacattgagattcgccgatgtttatactggaccatggctgcattacagaaatttgccaaatgatagaagaaacagagagaagaagactagcgaaacattatgttttcatatcccacattgcatataatcatgtacagtcgcattgtcagtgacaggcgagagagattgttgcaaccgagactaaaaaaataatatttgtgaaaattggcttcttactctcataaaagatgcatgttgccttagttcaaatcaaacaacgactatgaatcgcaagagaagcctctctcctttaacgctttggaaagcggcacatgtgttcaagcaccaaaacctagagtgctggtttcaatttgcgaaggatggagaatcacacaacaaggtgtttgcatctgatttcgaacgaacaaggaagcgagcgaaactggaagacgaaaaaccatttctgacgactttcagtgtcggaatacgtccaactcgaaatcagaaaagagtgctgaatgagatgcttagagtgagcaatcacgcttacaactggagcaactatctcgttcgtgaaaagaacttgaagcctaaacagtacgacttgcagactcacgtttgcaagaccaattctagtgacattccaatggaattcagaatggacgcaaatgacgactggtatttcgataacaagatgacaacgattaaaacagcagcttgtaagaacttctgtaccatgtacaagtcggcgttaacgaatcaaaagaagaagaaaaagtacatcaagactgtgactttgaaagacaaagacgatatgaatccgagtcaaggagcgttcgaaattcaaaaacaatttattcgtacattgaaggagacggacactgacgataatgatacattacaccactgtatagcagccatgccggacaattttactacgcgaaggaaggatgtaagaaatcgatttctgcgcttgtctaaaccagtgagcaaactgccacctttagaacatgccgttaagatcgtcaagacagcgaaaggaaagttcgtcttacatataccatgcgatccaaattacacgaggagcaaacggtacgacgaaccattcgattctatgtgtggaatcgatcctggcggaagaactttcttgacaatatacgatccatcaaagccacgggcatttcaaattgcatctcgatgtaaagctccatctaagccagttcgtaaacggacaaagaaaaaggggaaaaaatggcacaggaaaaagaaaagtcagcgccgggtcggtagcaccatagacaagattgacggtctgcacgcaaagatagactatgttaattcaaaaatgcaagcagctatacggcgaaagcagccccaagcaaaagaagatcgacaaagacaattacaaaaggtgtattatcaactaggtaatgctattagatgggtgcatcttcgttgtacatataatctcatgcaatactcgtacgtagccattggagagatcggcatacctagtatcattcgtaggcaatgtgatggaaaacgaaggcgtatcaacaagaagtctgtacggcatctgacagtgtggaatcattacaagtttcgtgagagacttttgcatcgtgccaaaggcacgaagactaacataatcattcaggaagaaagctacacctctaaaacatgcagcgaatgtggaacgataaacaacaaattaggaggtagcgaaacgttcaagtgcacaaatcctgcctgcgattacattacaaacagagacgttaatggtgcaaagaacattcttaggaagtctctcggtatcggctcaattaaaacgtaccgtccgtgactttgaacattggaaaagttaaatcggttgactcgccgaattccagctgaaccttataggggaagcattggcgaataaaaagggtcatatgcacgcggtaaaatgattttgaccgtcatagttatttcgcagacttctctattttactgtttttttatggtgttaaaggtcttgtatacattttatcaacgaagacttttgtattttacaaaatgtttgaaccggtgctgtttagctataagctgttttgcatcataaatgcgcccaacgcttttcttttatcataattacaagaaacgggcattccttgtgtgtttgattattacccaatggcgacgtaaacgtcaataaatggaaaatcattgccgatgcctcgttgtgcgtcgaaacgtctaagtactcagtgtatgttttatgtttaacgtcctttttgtcgtcggtattcaaagttttatatgacagaggtctactgatagagttattcaaataaacattcactttttttggtttctttattcagaaatagattagtcgagatcaaagctacgacagtacatcataagttacaccaatagaaataataaataataattcactgcactgttactgaacactccaaggcggtgcccaataagtcaatttatacaaatcgttccttttttgtcttggttgcagttatagttaacgaagacccgaactgcttcctgtacagtttaatgtgacaactaccctaacggcagggtcagttggttgatctggcttcggctttaccgttacatctctattaactgttaatccagtttctttgttttctatctccagtttctgacaacgtgatggtctaataacaatgttaaaatattcacatagactttttcagctccattcgtcattttgggttccgttgtgatattacaagtacagtccgaatttgggtccagactgtgctcacaccactccaagtcaatcccagaatgataattactcatgtatttccttaacatgtacatccaggtagataacctcatatccaagtctgtccttatttttgctatgtcctcgtacttcacgtacagacacttctttgcagtcagaaaatcacgtaaggcacactccacatcaatcaaatattcactgtctggtatgtttgaaaagtccacagtcaaacttgtcctgttcttgatgtaggctgtgaataattccatccaagtttctaccgaaattccaagatgtagtctactaatatttgcttcgttaatcgacaccttgtgatgtgtcggacacgcctcgctcagtacagtactaaaggaattcgacattgtgttgaataccgccgagctattttccatcttgtttatctatggtaagatgccatcctttcacacatttttatagtgcaaaaatgttatataattataaattcgctctcaaaacatcgccctgcggcatgccattttttccctttcaacacagtggggcaccgccttgcaaaaacgtcagtgagcatgccatttttttccatttcaacacaatggggtaccgccttgcaaaaatgtcagtgacaaatcatttttactgaacaaaggtgtcaatgttaatgcctttttttattataccagtttaaagtagcatttaacgttgggtcaaagttcattcccataaaaatattaggaccaaaggtatcctggaactcaacacgtctgccaggttttacacccgttatttctaactccatcttactttcattatgacaacatctgcagcaacaaatatgcagcaaaacgaacctttacctccataaaacacccccgatttaaagggggggggggtcttttttcagtcattttttcttcttttcccggacaaaaatcactctaaaacaccccaccttctaccacaaacatcctttgcaatccaactttttttcaaatcccattttggtttctctttaaagttgaggatcagtgctttttaagaaactatatataataggagtgttacttctttataattttgttgaaagatatttttttacactttaaaaaggcagactataaaacttacgagctttactggttataatataagaacaaagtacgggtacatgtaacgtaatcattttatcttaaagtttgtccactattcagacaaatataacgtccgggcaaaaactgactttttttataacataatcattttatcttaaagtttatcctctgttcagacaaacgtaacacgtccgagcaaaaatttacttttctaacagaactacatcatatgttttgatgtctgttcatcacaacatatttcattaaaaataattagttgacagtgaatactcaactatttataacaaattgttctacctgaaatacctgtcagttttccgtttaaggtagatattaaacgtcattttcctttttgtccagatttttcctttaatataacacaacagagagtattgacccacgttgcaaaaacaacaatgttgtgcaacagccaatatagatttccgacactttgtgcgactctgaacaatacctcgacaagttgtgaaactatctaagtatgcgtcattttagaaagagacgtaaaaatatgtggaattatgataaaacactgatatcagacaatggagtattttatatcgaaaacaaatgtgctaaactacaaaatgtcgcaacaagcataggaacatactgttcatagtgtattaaatagtgtggaaattatatattggaaagctctttatttacgttaccctttcacaggagttaactgcttgttctcttaaccattctttgaagaattacacagggattaaaatagaagatcatatactgagaaaaagggatatactaatgttaatgtcggtcggttctaaatacttgtaaatacatggtgattctgaaacgattgtgaaatggctgttgctatgtgtggcatgacacattttattaacaaatactttgtagagtgaccacacagatgggttagtgttaatgaatacgtgtgcattgagaacaaaatgttgtaatgagaggaactatgtttcatatcattttctatcttttcccagatgatttcctgagaactgtgtaatggctgcttcaacaagtcgcgccagggaagacggtataacggcagtacagagtaaagccgctgacgacgatgtagtcgaaaatggaggaataagtccgccgctctctgtaaagacagacgatgatgcttgctcagaaataattcgtattgaacaagaagctaaagatgataatgataatactgcagtaggacggattgttaaaacagtacaggttggtgtttcttttttgttttacttcctacacatgcatgtgctcagtagataaaaaggtagattaacgtttctaaatgttttacaaatacattctaaccaacgtataagacacttttgaagagtgaatactagcggccataaaggtaaatagtttccttcccaatagataaactccttaggtaaaacttccacggagcaatgacctctgtacaacaaaaactttcagttttgtaaacagaggagtagttgagttagctatatgtatatttagtatgataacttaaaagctgcgcagatattctatgtaggcgacatgtaacattttagcccgaatatactgaagccatttcaggtagtgttactgtactcgagaaacattaacgcctctaaaagaaaccgtataatggttaatagctattaatgtctccttacatcataagacatgaatgtcttgtggcaattttatggtaatggcgacttaacttttgccgcttcgttaccatacaaaaggcgattgtacgcatgcaaatgcaccatttggttttatgaccatacatgtttgccattgatttatttgcaatatattaatgcgtttactttcttaagatgtcttaagacgaaagattttgttaaagtaagcataataatttatgtatcaaattctatagaattctttccaggggatcatccctttgaagcatgacttcattcgtttaaagccaatcgtcaggaacatacatttatattaattttgatattcagatttgacaatttttagatattacaactaaaatatatattccgaagttgtgcataaatgttattaaagttttgaaaccttaaattctggaaagcataattcttttcaaagcattttccgatcgttgtatgctgaaatagatttctttatatgaagaaactgtggaaaaaaataaagaacaaaattatttaaatcttaattttgcaactacaaatgaatccttgaaaagaagtaatttaatttattagagcatctctatatatatatcaaagaaggcattccattaataaaggactttgtaaaacttattgtctaattattttcaatcctgtattatattcatcaactgttttattacatcgtgacatttttgtataacacagaaattaagggggaaataaccacgggagtgattccgctttactgaatatgacctaaatggacgtgattccctactgatcacttaccaaccttttaaattaaggtttaggtcggcctataacttgcgagctacattagcgaagatgttaagcatagacattaaagcttgtatttatctccaactgattgtttgagtgtgtcttgacgtaatactttctgcttaattgtatagcagtttgtccttgcgaactacttcaaatctttgattttatttcacaatttacgttagataacctttcccattttccacttaatttaggatcatataattgattttaccaaaattcactcgcgaaatttgaacacatgctgatttctaaagaaatgttacaataattatgtacttctacggtactagtaaacttacttcatgtcgtaataatatcaacaatatttcatttacatcagttaatacaataagacattggattcgcaaacattcttgtaatttgttt

SEQ ID NO: 4895 - protein, 286 aa, Mercenaria mercenaria
MPHSDWSKQFSLEGVCGYALLVSFCIRTMNSAVADLLSSLMTESRRQAMETFVLYKRRGIVRRAQNLIENIDNVVTCVNMDRGRYPSLFKSSMSALSKLNLWENEIREAANETDMSDVIAAARFLLENQGLLRDEIDNMDKAKKQITLTDTIVISDEDNDELPDIISPTMSTKSKSPIRGIRGLHKLKPYTRPSSTVTSSTLTETAWEKREHELLLAHQRELSEAKQEARDELMLCIICLSAQKDHTLVPCGHTFCEDCADQIKAKGKCCFCNAKIRSSVIVRLTD

SEQ ID NO: 4896 - DNA, 13389 bp, Mercenaria mercenaria
  source 1..13389: mol_type = other DNA
tagatattcgatgtcgtcgtctgaaagaaatccatacagttgttcttccaaataactttgatgacatctgctgagcaacaatgtatgctctgtctcgttgtaattcttatcttcgtcatcttcgtttcttagtagcatatccagagttcgagacctctgtctcagtgtttcaatgctgattatgttaactttcatcttgctaaattgttgagaagaattgttttgcatcttgacagtttgagagctgaagatataatgaagctcaagtgccgatttccccgatactgtaccgaaaaataactttttcaatccatctgctttctgattggtcaatacaaagtaggcgtggtttaaatgccacattctgattggtcgaaacaattttcgctagagggagtgtgtggatatgcactcttagtgtcattctgtatcagaacgatgaacagtgcagtcgcagatttactgagctcactcatgacagagagccgtcgacaagcaatggaaacgtttgtcttatacaagcgaagaggcatagtgagaagagctcaaaacttaatcgaaaacatagataacgtggtaacttgcgtcaacatggatcgcggacgatacccttccttattcaagagtagcatgtcggcactatcgaaacttaacttgtgggaaaacgaaatcagagaggcggcgaacgaaacagatatgtcggacgtaatagctgctgcgagattccttttggagaatcaaggcttgctgagggatgaaattggtgagttgacactttgagatttgacagtttgaatttgaaattgaactcgatacttttactagctaatactgacttgttgaattgaccatgtaacaacttttgtaaaacaactgacgttcgtttatgttttctgtttcagacaatatggacaaagcgaagaaacagatcacactaacagacaccatcgtcataagcgatgaggacaatgacgagttgccagacatcatcagtccgaccatgagtacgaaatcaaaaagtccgataagaggcatcagaggattacacaagctaaaaccttatacgaggccctcatcaacggttaccagcagtacgttgaccgaaacggcttgggaaaagagggaacatgagctactgttggctcatcagagagaactgtccgaagccaagcaagaggcaagggacgaactgatgctgtgcatcatatgcttgtccgcacaaaaagatcatacattagtgccttgcggtcacacattttgcgaagactgcgccgatcagataaaagcaaagggcaagtgctgcttttgtaatgccaaaataagatcgagcgtaatagtgagactaaccgattgatacttttgccttgttctgatgaaagatgatgatacattggaaataaaatgttcagaacagtgcagtgtcttactttgtcatatagtaatgcaaacatagcaatcccacttaggttagagagatttcgaaacaatgtcctaatccagactcggtatgtcatcgtgtttctgtacaagagtacaaagaacgctgtcacgaatccttatgattaaactttttcattatagatacgttcacgccttgagaaatataataggcatatgtcaactcatactggagaaaacgttgcatgaataacgagccgtgtatgtgttatatcaatttctgtcgtggtaagaaaaacaagccagtttgctaatcacataaagaagcagtgatttctttgtttttaagttcgtatcaatttcaaagcaaaatggttggtctaaactaggcatcaagggtcttcagcatgtaaaaatatcgtgtccaattctccagtatgaattgacatttcgtttttcaatattaagctaatcggacatcggcctgagttattagccgacgtattcgttgagcattgcaatatgacatttaaaaaaatgagcagtaccaaatttctttgactctgcgtttgtccagacttgtcactggcatgtttcgagaccactgtgacataagagaaactcttgatcacagggtttcgaaagatggtcgcattaaaagaaatttgggatagagttccaaatgatagaagaaacagagagaggaagtagtgtttcgaattttgaacgatcagtatctctgccagacattgtcatgcttgtccccgaacacctatcactacactcggatgaaagggctgttcaaaggtgatagcgagcgtctcaatagagaagtgtagctcttccaatgaacgttgtacgcacatgttatatctgaccaacaatcgtagcaatgatgggccaagtaattccccgtactagcgtcattgcctactgagcacagagtcgggccgaagccagcattaacgcttgacccacgttgatcgtttgaatgccaaatagcgagtgtgtgtgaaaagaagtaagacagaggaagaagtagaagccaaattcgcattcaaattgaccagatcggtatattcgcaagacattggcatgccagtccccgaacacctttcgctacacttggacgaaagggctgttagtaggtgatagcgagcatctcaatagagaagtgtagctcttcctaaaaacgtggcactgacatgctatgaaatgcaaacaatcatcgcgatgacgggcaaactaattccccgcaccggcttcattgcctaccaagtgcggagtcgggccgaagccagcattgacagtttacccgcgccgatctatcaaagtcaatctgaatgagaactttcggttgccgttcggtccattagtgtttttgattttgattgtttgaaataagataaagagatttgtgtttgtcaaagttttgaaatttcgacatgacatacaccagagttgggcttaaaaattaagtttttgtactaggatggcgttgcaagcttgtcataagtaggcaccctttggcatacagagctggtgtgtatacccgatctagcaatcttagcggacatcaaaagaccagatcctgtcactagacggggagattcctactttaccaagcttgtaacgcctcgtgatggccaaaggcggttccttatgctactgcacatcaccctaccatagcataaagttggtctaacgacacctccatacctttgactgtccttttttgttttgcctaaacttagcccaactctagcgatatcggttgccgttcggtccattagcattagtaattttgatttttgtttttttttgaagagcaagagaagagagaaaaaggttgcatcgttttatgtacagctgttacatgccaaatgagctgtacacttgatacaacaataaatttgaagctttgatttttttcaattacaagtaagagcttatgtttgccaaagttcataaattttgatgtcacttatgttatcatttagaagtgtgagcaagccaagagtcgttttcttgaattagctaaacaagtaaggatatgaaaacgccccttgccatactccaccaccaatgataaaaagtgacaaagccctgtgaagagaaacacattcaatagctacaataagttgtgcacaactttaagacttaacaaactaacatctaagacataattatcatatctaaacatcttaacactattcttatactaaggttgcaaaggtcccgtcgctctcatttcaaacaacttgtcattgctcctaacatgcaaaaaagctgaaggaaaaaaaatgtggttcgttaattggctatcgcattttctggcgatctgcaaaagcactgaacgatcaacaggtgaccatgtctaccgtcaatatcggaaagcagcatcaacatgatgcaagactcaaacagtagacactcagacgacctcgagagtaagtatatcacctcgagtgtcatttcaatcaactgagaactccagctattttaggctggaaagatattcaccacaatgacggggacaggagctcaaccgtctttccgttgtcggtatagcgagtctcctcgccctaaatggttacgccgaacactggacattctcaattgatcgaaaccccggatcaagttctagccgaaccaagacttggcatcgctatgccaatgtgcgttgccagtcttatgacctaaccaagtcctaacatatgcatttcgagagcgacgcgactttgccatagtactcaccccaggcattctttatctgtcttgtactgcacataccacgaataacactttcaaatccatacttgaacattttaacacaagaaaaaattttaaaaaaactgacgcggaaacaccttgaaattttggtgaaatccgcccggccaactgaacaactgagcttgtgtagccgcttttaaaggctcgcctgccgaaaaataactaactatgacgtcacgaacgatttgattggctgatagctttaaaattagttttgtcccacaggacgagtctacacaaaaagtaactagccaatcagcgtcgagcattttttcctcaagttttaagtggtcacatgaccaattgtacagccgtcgagagcagacgtgtttttgcattgctctcgctagttgtttgatctggcaaagattgacatagtcctaggtcccaaagtatgttcacagtacttgaaatggccaatgcaaagttttccttaaatacttaaaaacaacgtgtatggacctctttacgaaatttgtctgccacatcagacaatatcacatactgtcactgatgctgtgaaatcctacatataatgtaaaactatcaagaggagactattttgacaaatgtgtcttacatggtaaaatgtattatgtatacaatgataaaatgctatgacaatcaatatcgttttactactagcgaaacattatgttttcatatcccacattgcatataatcatgtacagtcgcattgttagtggtaggcgagattgttgcaaccgagacgaaaaataatatttgtgaaaattggcttgttacaggtataaatactgcgcgttgcctttattcagatcaaacgactatgaaacgcaagagaagcctctctcctctaacactttggaaagcggcacatgtgttcaagcaccaaaacctagagtgttggtttcaatttgcgaaggatggagaatcacacaacaaggtgtttgcatctgattttgagcgaacaaagaagcagataaaactggaagatgaaaaaccattcctgacgactttcagtgtcggaatacgtccgacacaaaatcagaaaagagtgctgaaccagatgcttagagtgagcaatcacgcgtacaactggagcaactatctcgttcgtgaaaagaatttgaagcctaaactgtacgacttgcagacttacgtttgcaggacgaattctagtgacgttccgatggaattcagaatggacacaaatgacgactggtatttcaataacaagatgacacaaattaaaaaggcagcttgtaagaacttttgtaccatgtacaagtcggcgttaacgaatcaaaggaagaacaaaaagtacaccaagacagtgattcttaaagacaaggacgatacgaatccaagtcaaggagcgttcgagattcaaaaacagtatattcgaacactgaaggagacagacagtgatgataatgatatcttacaccactgtgtatcagctaatgctgacaacttttctacgcgaaggaagaatgtaaatcgattcctgctcttgtcgaagccagtgagaaaactgccacctatagaacatgccgtcaagattgtcaagacagcaaaaggaaagtttgtcttaaaaattccatgcgatccaaagtacacgagaagcaaatggtacgaagaaccattcgatactatgtgtggaattgatcctggcggaagagcattcttgacaatatacgatccatcaaagccgcaagcatttcaaattgcatctcgatgtaaagcaccatctaagccagttcgtaaacagacaaagaaaaaggggaaaaaatggcacaggaaaaagaaaagtcagcgccgcgtcaggagcatcatagaaaagattgacggtcttcatgcaaaaatcgactatgttaaatcaaaaatgcaagcagctatacgacgaaagcagcctcaagcaaaaattgatcgacaaagacaattgcaaaaggtgtattatcgactaggtaatgctatcagatgggtgcatcttcgttgcacatataatctgatgcaatactcgtacgtagccattggagagatcggcatacctagtatcattcgaaggcaatgtaatggaaaacgaagacatatcaacaaaaaatccgtacgtcatctgacagtgtggaatcattgcaagtttcgtgaaaggctcgtgtaccgggccaaaggcacaaagaccaatgttatcgttcaagatgaaagctatacgtccaaaacatgcagcgaatgtggaacgataaacgacaaattaggaggcagcgaaacattcaagtgcataaatcctagctgtgattatattacaaacagagacgttaatggtgcaaagaacattcttaggaagtctctcggtatcggctcaattaaaacgtaccgtgcatgactttgaacactggaaaagtaagattggttgactcgccgaattccggctgaaccttataggggaagcattggtgaataaaaagggtccgtcgggtcattataactacaaatatgacactgtggttaagtttatattctcaactgattgtgataaccttatactttatatatgttactggtggctcaataatacagatgtgttgtgtgaatttcttgatacatgtgtaatttgtgaataaatttgaattcatgtgaaatatatatactgaatgaatagcattgtatatcactagtcactatacaaaacttttactttgcccatgccgatcagaatccaaacaagggaggaaaaatgctcaacaccatgtaaggactaggaaaaaattccaacatcataccattgcatcgagaagcatttcaaatctctgagtaacgttcgctatcatatagccttatggtcatgttttggcattctgatattttgataagagtcttatcgagaggcattttgtaatggttttcacagatctttttgcaggttttatttctaaaagaggtaactctgtcattcttacgtatgtaagagttatcgctttatttgcattgagacgatgcattgtaaaaagagtatcagaggtttgtctgcatttcgatgcaatggcatgtagctggatataaaggctcgtgacaaatacaaaaaatgagacgttcaggaaagcaaaaatgatcagccagaaatgagttttgtttcacgtgttgaaatttcgaagtactatacgccttatctaatatctcacaagtaatattctatgagaagtttttcaatttgactgtatttttcctaacgtgtcatgttgtatttcagaaatcagtttttttacaacgtgttgaaatttcgaagtactatccgccttatctaatatctcaaaagtaagattctacgaaaagtttttcagtttgactgtatttttcctaacgtgtcacgttgtatttgccaacgatccttacttgatgtatgatatttctccgagatgttaaaggccaaacttgtctgataagtacactaaataagcaaaggtacaaccagcgtgagtgaacttgttcattcaaactggtgaatacccttatcttttagtattgggtatggacagtgtacccggcaaacaagtcggcatagtataaattcggacagacaggagaggctataagactcatgatacagacaaacataccaaaccttcatctcggagtacttttctacagtgactgttgttactattgataaatgaaaaagcaaactcaagcaatagtagtgcctcttttacgggcattgcctcttgtacgggcagatatcaacagaagaaaacaatacacgttaatacgaaatacatcagagtctatctctttgcttcttcgaaaataaaaagcacacatcactgttctgtcatcaaaaatgtagacaacagcctgaaacagaaatgaatatctttaacagactgaaatacattttgaaagtaccaagtcctagataatttatcacaaaaaatgcaagctataacattaaattaacatggtgttatacttgttgaaatttattttagctgtgcataatgttgaatgtgaatacctgattgtcttttcataattgtgcctttggaagttttgtcacacaccactgctgtaacatctttggcaggtcaccacttcacaacaatgctctgaaaataaaatgaaatagaacatcaatcaatcaattgttcatattttctatgtggaataacactgaaatgctttgagaagtttcttcactcttacaaaatctatgacaaaaatgttcatgtatcaagcatcaagctgaatggcattgtacttgctgagtatttgtgaaatgcataccttatttttttgctgtggaaaatctgtcacacaaaacttcaatatggttgattggttgtaaaacttgagacatcttggcctgtacaaatcacatcacagtgctgaaaaaataaagcaaagcattagaaaatcacagcttcttgataactcattttgcaaaagtacttatgcatttttacacacaatgaataagacaaaattaagtccagaaatgtttccattatgtataactgagcatctcaaaaagcttggctagttcaaatgacaatcgacagtgatagccgaaacatgcattcagtgcctctaaaaagctgaaattattcctaattccaggggtcgcgctgtcggtcgccaatggcgccaaatgcgacaatttacaaaatctggctctaatttgggtcagttggcgaaagtctgtggcgacaacaaagcgataatcgggccgagacattttcttttttcgatgacgtaaccaaatgatataagcgacccgaaatgtgctcccaagttcaaggttgattaatcgataatttttgacagccgaatgttttgacaagcaccgattggtgttgattatcgcacacacgtgtttaatcatgtaaactgcaggtcattaatttcaatcatgtaaacagttgacaatagattactgctgtacaataaaggtgttggcgttgttatggatttacaaaaggaggtatgatatttgatgatagtcagatttaattgttcgttggaatattttaacagtttatcgttattgataattgcttgattgattgtaattaatacattaattgccaattacttaattcactttatgaatttcaaaagtgaaagtttgaaaacgtgttttgtgtgtgataatcactaattatgactctgtttatgaacctgtatataatgtttccctgattatagtgatttcactatacagtatggacactatggatccttgtcctagtactccttgtaaatctcaaaaacgtaaagctgaggagatctgtgcaactcctccagccaaaatttttaaaacttctcaaaattctaattctcctgtgaacagatcatttcaagaagcctggcaaagagactttcctttcttaaaatatgatgcaaaaactaagtcaatgttttgtattccatatatggttaaagtacaagaagtcctcaatagtgtgtataagtattttcacctctccccaaagaacatggccatgctagagatgttgcagaaagttagtaagggtcatagttccatgtttaaggaagtgtttcacacacgttggcttagctttgaaggctcagtagatgcgtttatcagaaactttagtagcctagtgtcagtattcttggaagagaaatcagggaagtcactcagtctgcacaaacctataacatgctacaaatttctgtatgtggtccatttcttggcagatgtgttgaaacctctctcagttctatctaaaatgtatcaagagtcagacctagattattcagaggtgacaccaaaactgcagtccaccatcagttctcttgagagattgctgtccgagaaagtcaggcttgagacttaaggaatttactgactctgttcctgaggttccacaggtaggggaagatggtttgtatacatttgaatataaaggtcacacaatcagagatggtgagaaacagcgtagagaagcaggtagtgtttgtgaacagtttgtaaatggtgtcattcgtagtctgaatgcaaggttctctgacaatgaagatggtgctgtcttgacagctatgagtaatattttcaacccacttgtagaagcagactctaaaccaggggatgtagacgtagcagcagagtatatgaaccagatagggtttgagaacagtggtgaggaaattcagttatttgtagagtttgtccagtccttagtacaagagaaaaacaaatctattagaacctctaaggatgtagccaatttagccattagaaagaaacaggtatatcctgttactgctgagtgtgcaagtagattcttggtagcacctgtctccacagtagattgtgagagagggtttagcaggcagaacttaataaaaacatgtttaaggagtaaaatgtctgtgcagtcattagatagactacttagaatatcaattgagggacctgaagtcaaagacttcccatatgatagagcctttaagaaatgggcattgatgaaaaatagaagaattttgaaataaatgctgtgaatcttgagtctggtaaacctgatgatgttccataacaaacaaaaacaagaattttaattactaaattgacaatgtttaatactgtcatatttgttgtattgttttctctgttaaacataaacattatttttaaacagactgatatacatgtaacaagtgaataggagattttttgctgaaatagttgttttgttaattttcagtctgctcaacatgtatttttgtacttaagtattcaatgaaaacatgtgtacatacaataaggataatttcagttaaatgatgattaagtactagaaatgttagtatgctactagtctactagaacttaagtatgagctttgttaagttttatttaacaacagcctacatgtacaagtgtctttaaatgtgcattgtgaagtgttgtgtaaaacagctgacatgtaccagtacctttcagatatggttaagagaaacactcattttacaaaatagtctttaatctgtgcttgttatttttgtatttgttttgtagtcttgaaaatagaactgaaaataaatgaagttgaattttagtatttgtttttgttcttgtagtttataacgcaggtaaaatgaactttcatttcccatcttcctctggcaccaatgttggctccagtggctcctccttggctccaacttttgccaaatggcgaaagtgttggcgacagctaaaaaatttccagagccatccctgtaattcagtccgtcaaaatgcttatttattcttctagaccacaaaacattgaacacagggtctagatggcatgccataacgtatttcagacgctatcaatttacccggcttcggctggcagccatttttaatttcaatacaactcgaagagaaaaccgacctacctttgcatgcagattttgtctcctgttattgctatcccagtccatccttggtagttttcgacggcagacattctgagacgtaatttgtcataaagattgttcagctccctccatctgcaagcacaagaaaatgattttattccacagaaatacgttcgcgcgcaaagccattactcccgctccttgctgaacctagtttgacctcacgtttgaccccacgtgacccaggtcaccgcccagatttcggaaaatacggtctaattttagacttgggtttccagaaaaagttcggagatggtgaacgacagggcaatttgaaatcgatgttttgaagtcaattctgatcgcagaaagctgaaaatggtctcattgtaaagcgaagacatttgtccttgtggtgtcaaattgtcagttgcgtatcttgtttactttttgcagaattatcgcccaaacatgtacctttgttgtcacggagcggccattttgttgtttaccgtggtgtgtcatttctgagctaaaaattaagtctttctccaagattgtaaattatgacacaattatcataaaactagaaaggttttacctatagaatgagaccaagaacacgaatttacatcgaagattgaataagatattcacgtctgaaaatcactcattttcgtgcctattttgacgaattccgtcacttttttcagagttaaaaatctgctagaccaaatgacttggaacaaaatctttacatgcatttatgaggctaggtaactggctttctgattctaaagcagatattttttaaatccatgcattagaaaactacgacggttgaaagttgcaactttgcaaatggcgcatcattgttatgccggtattacggtctgtcacttctgagctaaaaatcatctatttccagattcgtgtaaattttgacaaattaacatcgaaacaagaaagggtttagctgtcgaatgagaccaacaacatgaattttcattgagaaatgaataagatattcacgtttcaaaatcactcattttcgcgagcatttcgcacgaatttgaacaatttttcatggtaaaaaatatatataaccaagtgtttcagaacaagatttttgcatgcattcgttacgctagcgaacaggctttcttgtcctaaaagagatattttttacttccacgcgtttgcgaaatagaagctctcaaagtttgacaaaaattgcatcattctgctcatatgacgttgcacaaaaaagtcaaaataaagtgtttcttcctactacaaacttatcaaagcaagaatatgtcattcgctgacataaaatccaccaaccttttcattttgttacttccaaatcgtccaaattattccataaagctccaaaactcagagagaaatatgcactctcattttgctcaatgcagttgtaactgtgacgcactgtttgtatatgcacgcggtaaaatgattttgaccgtcatagttatttcgcagacttctctgttttactgttttttatggtgctaaaggtcttgtatacattttatcaacgaagacttttgtattttacagaatgtttgaacctgtgcagttattgaaataagctgttttgtatcacaaatgtgcacaacgctttagatcagaatacaaccgtgtttggcagcaaaaaaaatgcatgttttcagaaaatagtctgttttatcgactgtaaagtgttacaagtacgttgtttatgccttgtacatttcaaatcaaagatatagcatgcacttgatagggctttgaagctgtacattcattgaactgggctgtttt

SEQ ID NO: 4897 - DNA, 11572 bp, Mercenaria mercenaria
  source 1..11572: mol_type = other DNA
tcgccgccttaaaacttttctaagaaatacgatgaccgaggaacggctgactggactcgctctgatgcatatccatcgcaatcaccagatcgatatcgatcaggttatacgtgatttcgatgtgtctgggcatcgacgaatcgcactggtttttgataattgaggcaataacaaaatcagaagcatgtagagaaagcaaagaaaaatacttctgtctacataaaaccgtataaaattgaataaaaatacaaaactaataaaagtacacacacaaaaaaataaaaacaacactaaaaaaaaacaaaaaaaaaaagacgtcgcggggacatctatgagatcaaattatgtactcatcaccgcctgatgagacctattggagaggtcgaaacgtattttttcctacaataggagagatcgtgtttgtatacgaatccgttgtatattctatttttagaactgataagacaaagatcggtgggcagacgccgagcgtccatgttttttttggttaaaagtgatgtttttctaacaacttaaactttcttaaaacacaaacgatatcaatattttttttgatcagtggaaagaatataaaacaagcaatttattgataacttttatatattaaattgaaaatttcgatcccatacacaaacgatgtaaaaacattttgatttgcccaccgctagataaacatgtgttgatgcgtgacgtcagggcgatctctcctattgtactttaatcatttccttttttgataacactatatctcgctatatgcgtttcttaaaatgcaccagaatgcgtcttttcgtgttctttttttcaaaattttcccgggggaggacccccggacccccacctgtgggagggggacatcccctcccacactctcccctctcggcacttcgtgcctcgtactgcgtacatttttcaaaatcctggctacgcccctgcataccataatgaaacttggtcagaatgttaatcttgatgatctttaggtcaagttcaaatctgggtcaggtggggtcaaaaactaggtcgccagttcaaatcaaaggaaaagctagttaacactccagaggtcaaattcatgaccataatgttaatgaaacttggtcagaatgttaatcttgatgatctttaggtcaactttaattctgtgtcaggtttggtcaaaacctgggtcaccaggtcaaatcaaatgtaaagctagttaacaatctataaaggccacatttatgtctgtatcttcatgaaacttggtcagaatgtttatctagacttacattgttctgttcgtgagataaaattcattccatttcaagggagtgctaggaataccgaattcatcttgaaggatttgaatcagtataggggtatctagtgatcaatttcttctgcttgtcaagagtcaagttcagttttaatagtgcaacagcagcaagaagagaccatttcctctatataacaccatttgatatcaggatattgtatttgtaaaagaattgagcaaaggtcccagaggacccaaaaatctgttataatgttccaagtttaaaatagtcttgatttctatataattctataggattatgcaaacagaaacagacagcatgtttactttttctttaaggtattggacccctaatagtaatgtttaaaaaatggcatttgcttggtatattcttaaagttgaccatattttgcactttgttgcaattttaaaacaagttttacagtgccgtttttagctcacctgagccagaggctcatggtgagcttttgtgtctgtcgtgtgtcatcagttgtgcatcgtgtgtcattcaacattttctaaaaaaaaatctttttcttgaaaaccactgggcagaattacaccaaacttcacagtatgatccttgggtggtccccttttaaaactgttcaaagaaattaattccatgcagagctctggttgccatggcaactgaaaagaagaactttaatcttcttgtccaaaactgcaagacttagagccttgatatttggcatgtgacatcatcttatggtcctctatcaagattgttcaaattatgcccctggggtgaaaagaggccccgccccgggggtcacaagttttacatagacttatataggaaaaatcttcttgtctaaaatcacaagacctagacctttgatatttggtatgtagcattgccttgtggtcctttaccaaaaatgttcaaattattaccctggggtgaagtgaggcctggcacagggggtcccaagttttacaaagactcatatagggaaaaaactttaaaaatcttcttgtctaaaattgcaaggcctaggcttttgatatttggtgtgttgcattgccttgtagtcctctacctaaaattgttcaaattattaccctagggtgaaaagaggccctgtcctgggggtcccaagtttaacatagacatgtctgaaagttcattgcctaagcctttgatatttggtatgtatcattgcctagcagacctctgacaggattgtttgaattattccccgggggttataagtggccccgctctggtggtcacttgttatatgagttatataggaaaaaatacttcaaaaattatcagatcatatttcctagactgtttaattgtatatacctgatgtacccaagtgattacatgtcaccttactgtaaccttgacttactgacctactttcttgttttttgagatacagccttgaaatttgaatgacatgtacagttttgcataccgatcttaaaactgactttcagttaccatgaatgtgacctactgacctactttctaatattttagcatcagtttgccatttgaaacatgtggctcatattactcaggtgagcgatttagggtcatcatgacgctcttgtttataaattttgtataatttatggtatttcctcaagctcaagtagagacaaatttcaaagtgatggccactgtccaaatgtttgcagagaattcattacaccattaaattcgataaaagaaacatgaaactattagtaaacaatgataaaacacaaaataaaagtgtcaatatcatttttatgcccccgaagggaggcatatagtttttgaaccatctgtcggtctgtcagcaattttcgtgtccggtccatatctttgtcatccatggatggattttcaaataacttggcatgaatgtgtaccacagtaagacgacgtgtcgcgcgcaagacccaggtctgtagctcaaaggtcaaggtcacacttagacgttaaaggtcatttttcatgatagtgcattgatggccatgtccggtccatatctttgtcattcatggatggattttcaagtaactacgcataaatgtatggcacagtaagacgacatgttgcgcgcaagacccaggtctgtagctcaaaggtcaaggtcacacttagacgttaaaggtcatatttcatgatagtgcattgatgggcgtgtccggtccatatctttgtcattcatgcatggattttaaaattattgggcatgaatgtgtaccacagtaagacgacgtgtcccgcgcaagacccaggtccgtagctcaaaagtcaaggtcacatttagacattaaaggtcatatttcatgatagtgcaatgatgggcgtgtgaggtccatatctttgtcattcgtgcatggattttaaaataactacgcatgaatgtgtggcacagtaagatgacgtgtcgcacgcaagacccaggtccataggtcaaaaaggtcctaaactctaacatcggccataactattcattcaaagtgccattgggggcatgtgtcatcctatggagacagctcttgttcagtattaaaataacttgattactgaaacttgatggatagatcaaggcccttgccattaggcaccttgaagtcagtcaaaccttcatggctttaccttcccatagctgtcaaggctcaacaaaggccacgagtgtgatcggggttcaaagggaaggttgtccttcatagggggtctggagggcgatgattttttaacacaaaatacaactgatttttaaaagtttccctcaatgtttactttttgtgacgtttattcatgaaaacaatagaaataacatgttgcaccggtgaatgtaaaagctgtattatacggtataaaaacaccgtgtcaacgtcgccttgcatgttcgatccagtaatgttctgtgttctttatttctttaaaatgcgtgtgacttggaaaagtaggcgtgtgagcgtgacctagggtcgaaatgcgtgtgacacacgcgcaatgtgtgtgtcttgacaggtatgccttcctcgcatttcagaacaattatcacttcgtcctatatttcaagctttgtaacaagtaatgaacaattttttagtacacacagtcacctgcctataatatattgtgaggccgtccaactgatttaaacacaattagtaacacgaaacatgtacatgtatatttttgatcgcatagaaccagaagttacatcaacgatttcgacgcacgtattttatgtcagacctaaaacacgatattaatctttagccctaccagtcctgttcttgatcaatctatattggtgattcgcttggaatactgttatttagaaagatatgcaagaaatacgtcgcttatatcggtcttttgcttatgtaacgtcattttcgattggatagtagctatctccacgtacgtcacgtaccgttcacataccgttgtcgtatgccgagccgtgctaaaactataaaaggcctgtttttcggctcctcatttgtcagtctttcctccaccctgaagacagtatccactgtgttaacacattcgacccgcacgacgacttttctcgtttctatcggaacaagcattagtgaaactttcgatgaaaaaaaagtattaaagagaaatattgttttcctattcactataaaacttgttacacttcggtttactcctcacttcaaaatgaagagaaaacgagaacagatgactttgtggaaagccgcattcgtcaatggacgggaaacgttcaagtcatggattgacaaagcacgaatgctggaattgaactgtgacgtctcgtctgcaagctcgactcattactctgatttgaacttgaaaacaaagtgtgcaaaaatggaagacaagtttatgtgtacattttctgtcggcattcgacctacgtcaaagcagaagcgaacgttgaatcagatgctcaaagtgagcaaccacgcttacaattggtgtaattacctagttaaggagaaagacttcaaacctaagcagttcgacttgcaaagagtggttactaaaacgaattcgcacgacgttgcagccgagtacagacttccaggagacgactggtctttcgacaacaagatgtcttctatcaagttgaccgcctgtaagaacttttgcaccatgtacaagtctgcgcagaccaaccagaagaaaacaaaagtcgatctcagaaacaaagacactgctctgttacgcgaaggctcattcgaagtgcaaaaaatgtttgtgagattgcttaccgaaaaagacatactagacgaacgtattcggcaatcgagaatagctttgatgccagaaagcttctccaaatccaaaaaagactggaaagaaaggtttctccgactttcgaaaaaagtatctaagataccgcctttgagccacgacatgaaggtatgcaaacgtccgaacgggaaattcgtactgcagattccgtgcgatccgaaatacacgcgaaggatacaagtgcacagttcggattcgatatgttccatcgatccgggaggcaggacgtttgccacgtgttacgatcctagcaatattaaggcatttcaaataggacccgagacagacaagaaagaggtcattcacaagtatcacgagaagatcgacgaagttcatcgtctcttggcgtacgctcaaaagaaaaagcagacgcaagccgtacaagacagaatcggacaactgaagaagcacctgaaattgaaaacgtacgtccacgacgtgcacttgaaactgtgctcatacctggtcaagaattacaaactggttgttcttggcaagatatcggtttcgtccatcgtgagaaaagacagaccgaaccatcttgccaagagcgctaacagggatttgctctgttggcaacatttcagattcagacagagactgttacacagagttcgtggcaaggactgcgaagcgatcgctcaagacgaacgttacacttccaagacctgtggtaattgcggtgtgaagaacaacaaactcggtggaaaggaaacgtttatttgtgaaagttgcaattacaaaactcatcgagacgtcaacggagcgagaaacattctgtgcaaatacttgggactttttccattcgcagcataacgaaagaaattgacaatcgattttttcgggttcgattctatcccacttgactcgaagagtcagagggctcgaatacattttctgcacaggttttgccaatgcaagatctggggcaagaatgtcttcgggtcaaatgagttatatgcataaaaatcggctccacaaatattaatttatcctgacatatgcatactgtatgagagtcataaacagtaacttcttatttatatgtggaatttatgaatactttgtaaactactgaatattttatactggaactgctggaactttatatctgaataaaagatgtgtgactgaacactgattttgcctctttgctagagatataggtacatagtcatcactctttgtccgaacccaactcaacaactgttcccagtcctaggcaggagtgccggcggaacaacatattcttctcaagggtggataatttttatgatgcagctgaagagctgtaagtatgcgattacaagttagaatggaatttgtattgaattaatttgaacaggctcatgctttacagtgaatccaaaattatcaggttatatttgatggcgaatcaaaatggttatttcctttcatttgcaattagattctattaaggtaagaaagatatcaattaaaagagataaaaattgcttgaatcagatattatacagtttctactcacatgtgataaccagaggaagcaccacttctccttgaagtctctccactttccgcttatcttgtctgagggaaaagtgatttctacctgaaatctgagccctgtagatgtctttacactaaaacagagatccagtctaataccccagtcacacatatggcgcggatagctacgtctagccacagatggaaacgtagtaatccttaacgatccgtacctgtgccgtacggattgatacaaattactacattaaggtacggctcaggtacggatcgttacggattactacgtttctatccatggtcaaacgtagctgtccccgccgtatgtgtgactgtggtataacctactacatatgaattgtaacttctcagcacttaattatgcactccttcatagaaggaaggatatattgttttgcatatgtcggtcggcctgtctgtctattgttccgtagaccaattccatgaatatggataggtaggttggtcattacaaacagatgacccctattgattttgagattagtaggtcaaggtcaaggtcacagtgacccagaacagtaaaaccgtttccagacaatgaattgagaaagcttgggcctagtctcacgaaacttaatagggaggttgatcatgaccagcagatgacccctcagtaggtcaaaggtcaaggttacagtgacccagaacagtagaaattttttggccaaatagctagagaatgctttggtcttagatcacttttgatacaggggtcgcttatgactggtaagtgacccataattattgatttgaggtcagtacgtcaaatgtccattgcacagtgagcaaataatttctgttctgtgtgcagtcactgaatgcgtcaagaggggaatttcgtgttctacgagctcttgtgataacatagagttatatcttaaatttgtaaacctgttgtgtcataggcagctttgtgtatctaccagtacataaaaatgcagtagcaaagaattatctggcagttttaaatgttcatactgaattctacctccacaacagtaaaatgtataaactaatattagattttcaatttacttactaggaccatgtgagggcctgtgagtatcggcctgcaaaatgtacaaatgctgattgtcaacagttgttcccagcgaatcttttagaacaacatgtaaaaaatgaatgtgaatacagaccagtagcatgccagttctgcaagaatccaattcctttaaaaatattggaggtaagtgagtattcaagaatatattgtggtaaatctcagttttggcagtgaaatattttgctttttgtaaatatttataatagttttaggtaccatgttcttaaatcacacattaaagggtacattatgacaaagctttgctgaaaatttgaaccttattgagcaaaattaatattatttgagttattcccaaaactattctcaaaatactccagtctttgagaaagtttatcagcagaaactaataaatgctcttaaagttatattttagattttctggtgccatttcttattagtcccctaccagtggaacaatggagggaattataggaatgcctgccatctgtctgagcttatgtttgcagcaattttttcccttgtataagtggtactgaatatcgcacccattcacattgcaaacagtctttcacaattttcaaattgggtccaatggaccaattcataataattatacgcccgaagggacgtattatgttatgacgctggtgtccgtccgtctgtcccttagcaatttcgtgtccgctctgtaactcttgaaccccttgaagggtttcaaggaaactttacacaaatgttcaccacactgagacgatgtgcagagcgcatgttttggatgtctcgcttcaaggtcaaggtcacacttaggaatcaaaggtcatatcagtttgtttcgtgtccgctctgtaactcttgaaccacttgaaggaaagaaacttgacacaaatgttcaccacaccaagacgacatgcagagtgcatattccggatgacttgcttcaaggtcaaggtcacacttaggggtcaaaagtcatatcagtttgtttcgtgtccgctctgtaactcttgaactgctggaaggatttcaaagaaacttggcagaaatgttcaccacattgtaacgatgtgcagagcgcatgttccggatgactcgcttcaaggtcaaggtcacacttaagggtcaaaggtcatatatgactttgctttgtgtgtattgctctgcattgcagtgctcttgtttttatttggcagatctctttttatacgcccgtttgaaaaacgggacgtattatgggaacgcccctggcgggcgggcggcgtccacagactttgtccggagcatatcttctacgtgcatggagggattttgatgaaacttggcacagttgttcaccatcatgagacggagtgtctagcgcaagaaccaggtccctaggtctaaggtcaaggtcacacttagaggttaaaggtcaaattcaagaatgactttgtccggagcatatcttctacatgcattgagggattttgatgaaacttggcacagttgttcaccatcatgtgacggagtgtcatgcgcaagaaccaggtccctaggtctaaggtcaaggtcacatttagaggtcaaaggatacaagaatgaaaactttgtccggagcatttcttctttatgcatggagggattttgatataacttgtcacaaatgttcaccaccatgaggcggagtgtcgtgcgcaagaaccaggtccctaggtctaaggtcaaggtcacacttagaggtcaaaggatacaagaatgaaaactttgtccggagcattctttcttcatgcgtagagggattttgatataacttgtcacaaatgttcaccactatgaggcggagtgtcatgcgcaagaaccaggtccctaggtgtaaggtcaaggtcacacttagaggtcaaaggatacaagaatgaaaaccttgtccggagcatttcttcttcatgcatagagggattttgatataacttggcacaaatgttcaccaccacaagacgaagtgtcatgcacaagaaccaggtccctaggtctaaggtcaaggtcacacttagtggccaaaggtcagatacaagaatgactttgtccgaagcatttcttcttcatgcatggagggattttgatgtaacttggcacaattatacaccatcgtgagaggaagtgtcatgcacagttcctttctttagaattacttcccttcattgttactataaatagcttatattgtaacttcttcattactagtcgtagggaaaaatcgagaccacttttctgtagtacaatatgcatgctacatccaattttgaggtgtattttgaccaatctctacctggtaaagatttttgtgtggacttaaaaaaaaattttggattttttttttttttttttttgtgcccccccatgagtggtgggggcatatagatttggtcttgtccgtccgtccgtccgtccgaagttcgtgacacgcctagctcaaaaagtatttgatataaattcatgaaaccttgcataagtctttatcatgatatgaacttgcgcacctcctatttttcgtctggctccgccccctatttttagagttatggcccctgaaatagtcaaaaatgcacattatcaccttgtgacgcacctagctcaaaaactatttgatatagattcatgaaaccttgcatgtgtattaatcatgatatgaacttgcgcacctcctatttttcattttggtccgccccctattttcagagttatggcccctgaaatagtcaaaaatgcacattttcaccttgtgacacgcctagctcaaaaagtatttcatataaattgatgaaaccttgcatgagtctttatcatgatatgaacttgcgcacctctgatttttcatctggctccgcccactatttttagagttatggcccctgaaatagtcaaaaatgcatatttttaccttgtgacacgcctagctcaaaaagtatttgatatagattcatgaaaccttgcatgtatattaatcatgatatgaacttgcgcacctcctatttttcatttgggtccgccccctattttttgagttatggcccctgaaattgtcaaaaatgcacattttcaccttgtgacacgcctagctcaaaaagtatttcatataaattgatgaaaccttgcatgattctttatcatgatatgcgcacctcctatttttcatttggctccgccccctattttttgagttatggcccctgaaatagtcaaaaatgcacattttcaccttgtgacgcgcctagctcaaaaagtatttgatatagattcatgaaaccttgcatgtgtattaatcatgatatgaacttgtgcacctcctatttttctttgggtctgc

SEQ ID NO: 4898 - protein, 137 aa, Mercenaria mercenaria
MSRTAAPLAVLIQQQRQLDTNSEMSRVTLQSEHNVDVIDVVEDADEAVNVDTLRNLLETFVSDTLSLAAEIAVQNVQEALQEFKKCRICLDEEKNVVLVPCGHIMCVNCIVRSFLNNRHCPFCRSDIRFISKLRFTD

SEQ ID NO: 4899 - protein, 478 aa, Mercenaria mercenaria; identical to SEQ ID NO: 594

SEQ ID NO: 4900 - DNA, 22609 bp, Mercenaria mercenaria
  source 1..22609: mol_type = other DNA
attacctggaaaatagatcgcaaaaagtatttgtagggcaatcgttttcaaataataggttattaactgcaggcgtacctcaaggatcggtcttgggccctcttttatttcttgtatacgtaaatgatattgctgattctgttataagtaccgctagactattcgctgatgatagctcacttgctatatcttcaccagactccgtttatatagaaactgttttaaattcagatctagaaaaaatttccagttgggcaagtcaatggcttgtaaaattcaatccttctaaaactgaagtcatgtttttctcctttagagatatagctcaaccttcgttaacctttgataatacccctctaaacttcgttgacgatcacaaacatctaggtcttacaataagtcatgatggctcttggcacacccatataaacaatatcacttcctcagcttcaaaagtactcggctcgatgagaatgttaaaattcaaagttaaaaggtctactcttaacaacatttatttatcgtatctaagacctctactcgagtatgcttcagttgtatgggatagctgtactcaatatgaaaaggacactatagaaaaatttcaatatgaagcagctcgcattgttactggtttgactcgttccgtttccattcaaaatttattaactgaagttggctgggtttctcttgcagaccgtagaattatgcagaaattaatattagcttataaaggaaataacggactgcttccagattaccttatagacatttttcctccaacagttcacaattctaacaactatgaacttagaaacaacactaattttgtaacattgcctagacgtctcgaaatttactcaaaatcagttatacccgattcagtaaaactatggaataaccttgacctcccgacacgcaatgctaacacacttacatcttttaagagcaaattgaagagtaaatttaaatctccaattgttccgtctttttatctaataggagaacgattctataatgtagttcaaactcgtattagaaaccgatgcagcaacttaaacaatgatttattttataaccatttacgagactatcccgattgctcttgtggacatggtattgaagatgcggaacatttcttttttaaatgtagccattatgccgatgctcgtcgattgttatttatcaatactcgaagatttcatcctcttagtactcacaaattacttcatggaattgattcacttactattgaggagaacaaatctttgtttttagaagtacaaagttatataaaaaatacacgtcgtttcactagcactgcctcctgatcttttgactatatatctgtttagaaggctctgggctgggctggatgtgggtattctgcagcggatgcgatgaggtgcactgattgattttacgcttgtctgtgttagttttattgttgttgtttttttttctttcgattgttttttccctgcttttcttctattaaatttactgtcttaactcttcttctatataagtaagtttataacttaaaattatattttgttaagcatatatattttttccattccagaccaaacaaaaaatccgccatttagtttaatctaacattaatttgacagccagggacggaccgatttctaatgttggtaaaacttgtggtccaacccttttgtattatcgcacattcgcaaagttactgaatacttcctaatgtacagtagtaatatatatgtcttgtataatgatagtttgctattgtatatatatatttacatatgtatctgtataatagtgtcttgatgtacattaccataatgtcttgtgtgatgattacaataaaatatgattaaactaattatacacgtgttgaggcgtgtaattccatgaagagcggcgtttggtccccagataaaataaaataattaatttgccccagacgaaccgcctcggtagcccagtggtagagcgtccgcttcgagtgcgggaggtcgtgggttcgatccctggtcgcgtcataccaaagacgtaaaaaaatgttattagtagctacctcgcttggcgctcagcattaagaggatagtgctaggactggtcagcccggtgtcagtataatgtgacttggtggggtatcatgccacgtatctacggcgtgatattccagtgaggcagcactataaagttgggcattgtgctcgcaggttgatcactatagctcaccttgagcattgctcaggtgagctaaaaatacttttgaaaataaaatgaaggaaatattggatgaaaatgtacatttccaagtgttttctgtgttattcagttgatcgttgttgtgtatttatctttggtacatgagtgtctgcgctattgtggtgtacgttgtagtgcgaagaacatggcattcctttgtatattcgtccttgttcaaattaccccttcggggtcctcttccgccccctcccccaccccattttgccctttaccatttccttcccatccatctatatttagcataatttaacatgtacttgttggatgtttgaagcaacccgtctgaaatattttttccattacagcttctttctgttgtgggcctactatgcaaaagcgtggctctggggctgtgttttttggtgctctgtgcttccgaaaaatctacccttccctattatcttttgttgaaatttgtgaaaaaataaccactttcattgctggttactttctgtacactatacggggaatgtaccaagattaaaataatctgttcaccgccaatgtaatcaatatgtaattgacctttcaataaaacagaacaatatacactcacaaaatttcctaatcggtcagtttatattgtagtactattttgtttattatgcatgtatttacgagaaatttcacaaactgacatttgaataggtactaaagctaattattggtgtatttttggccgactaacggccactgaaaccgcaataggcgttttgaccaatacagcatattttgcatgtgcagggcatgtgcaccagtatgcacgtgttagtgaacatttttggcattactgacgaaggtccttctagaaaaacacaccaaaatgggatttgaaaaaaagtcgaattgcaaaggatgtttgtggtagaaggtggggtgttttagagtgatttttgtccgggaaaagaagaaaaaatgactgaaaaaagaccacccccccctttaaatcgggggtgttttatggaggtaaaggttcgttttgctgcatatttgttgctgcagacatgcagttggtaactatcatgaagctgtgctatgtgtctgtcgactactgttgttgtttgaactatgatgcagcagagtcagagacagagtcctgccacaagaaatgacaatgaagcatgtgtcaaaagctggattagtgaacataaattttgttgctacaatgaaacttttttgcaaggcggtgccccactgtgttgaaaggggaaaaaatggcatgccgcagggcgatgttttgagagcgaatttataattatataacattttgcactatgtaaatgtgtgaaaggatggcatcttaccatagataaacaagatggaaaatagctcggcggtattcaacacaatgtcgaattcctttagtactgtactgagcgaggcgtgtccgacacatcacaaggtgtcgattaacgaagcaaatatcagtagactacatcttggaatttcggtagaaacttggatggaattattcacagcctacatcaagaacaggacaagtttgaccctagacttttcaaacatacccgacagtgaatatttgattgatgtagagtgcgcgttacgtgattttctgactgcaaagaagtgtctgtacgttaagtacgaggacatagcaaaaataaggacagacttggatatgaggttatctacctggatgtacatgttaaggaaatacatgagtaattatcattctgggattgacttggagtggtgtgagcacagtctggacccaaattcggattgtacttgtaacatcaggacggaacccaaaatgatggattgagcagaaaaggtctacgtgaacattttaacattattattagaccaccacgttgtaagaaattggagatagaataaatgtttttactaaatgacttaactatgaaacatgtaacacagttcagtaaataaagtctcatactgttcattcaacattgttttgttttttatttcaatgaacagttagatctgagcaataaccaggaatttctggttataagttctcatatacagtggcagcggtgccagtttcgatgtacaactgtgtactgtataaacagtgaatcttcctttacctcaatgactcattatgttttgaacatttaattcagatagagaaatgttgtatctgtatttgtaacacacaatgcaaagccagaactgcttcttatatgatttacaagcaaatcctagagttacaaagatattacacactgtgcacatttttgcctcaaaacagcccagttcaatgaatgtacagcttcaaagccctatcaagtgcatgctatatctttgatttgaaatgtacaaggcataaacaacgtacttgtaacactttacagtcgataaaacagactattttctgaaaacatgcattttttttgctgccaaacacggttgtattctgatctaaagcgttgtgcacatttgtgatacaaaacagcttatttcaataactgcacaggttcaaacattttgtaaaatacaaaagtcttcgttgataaaatgtatacaagacctttagcaccataaaaaaacagtaaaacagagaagtctgcgaaataactatgacggtcaaaatcattttaccgcgtgcatatgaccctttttattcgccaatgcttcccctataaggttcagctggaattcggcgagtcaaccgatttaacttttccaatgttcaaagtcacggacggtacgttttaattgagccgataccgagagacttcctaagaatgttctttgcaccattaacgtctctgtttgtaatgtaatcgcaggcaggatttgtgcacttgaacgtttcgctacctcctaatttgttgtttatcgttccacattcactgcatgttttagaggtgtagctttcttcctgaatgattatgttagtcttcgtgcctttggcacgatgcaaaagtctctcacgaaacttgtaatgattccacactgtcagatgccgtacagacttcttgttgatacgccttcgttttccatcacattgcctacgaatgatactaggtatgccgatctctccaatggctacgtacgagtattgcatcaggttgtatgtacagcgaagatgcacccatctgatagcattacctagttgataatacaccttttgtaattgtctttgccgatcttcttttgcttggggctgctttcgccgtatggctgcttgcatttttgaattaacatagtctatctttgcgtgcagactgtcaatcttgtctatggtgctcccgacccggcgctgacttttctttttcctgtgccattttttcccctttttctttgtccgtttacgaactggcttagatggcgctttacatcgagatgcaatttgaaatgcccgtggctttgatggatcgtatattgtcaagaacgttcttccgccaggatcgattccacacatagaatcgaatggttcgtcgtaccgtttgctcctcgtgtaatttggatcgcacggtatatgtaagacgaactttcctttcgctgtcttgacgatcttaacggcatgttctaaaggtggcagtttgctcactggtttagacaagcgcagaaatcgatttcttacatccttccttcgcgtagtaaaattgtccggcatggctgctatacagtggtgtaatgtatcattatcgtcagtgtccgtctccttcaatgtacgaataaattgtttttgaatttcgaacgctccttgactcggattcatatcgtctttgtctttcaaagtcacagtcttgatgtactttttcttcttcttttgattcgttaacgccgacttgtacatggtacagaagttcttacaagctgctgttttaatcgttgtcatcttgttatcgaaataccagtcgtcatttgcgtccattctgaattccattggaatgtcactagaattggtcttgcaaacgtgagtctgcaagtcgtactgtttaggcttcaagttcttttcacgaacgagatagttgctccagttgtaagcgtgattgctcactctaagcatctcattcagcactcttttctgatttcgagttggacgtattccgacactgaaagtcgtcagaaatggtttttcgtcttccagtttcgctcgcttccttgttcgttcgaaatcagatgcaaacaccttgttgtgtgattctccatccttcgcaaattgaaaccaacactctaggttttggtgcttgaacacgtgtgccgctttccaaagcgttaaaggagagaggcttctcttgcggttcatagtcgtttgatttgaactaaggcaacatgcatcttttatgagagtaagaagccaattttcacaaatattatttttttagtctcggttgcaacaatctctctcgcctgccactgacaatgcgactgtacatgattatatgcaatgtgggatatgaaaacataatgtttcgctagtcttcttctctctgtttcttctatcatttggcaaatttctgtaatgcagccatggtccagtataaacctcggtgaatctcaatgtaactacatttagtaagcaactacattgaattctcagatggtgatacttggaaacatgacggtggcaagcccgttaaatgcagagccatagaaatttggtactgtacatttttctaaaggtgatattgcgatgctgaacgaatacgtcggctcgtacctcaggccgatgtccgattagcttaatgttgaaaaacgaaatgtcagttcatactagagaatcggacacgatattttcacatgccgaagacccctgatgcctagtttagaccatctattttgctttgaaattggcacaaacttaaaaacaaagaaatcactgcttttttaggtgattagcaaactggcttgtttttcttaccacgacagaaattgatataacacatacaaggctcattattcatgcaacgttttctccagtatgagttgacatatgcctattatatttctcaaggcgtgaacgtatctataatgaaaaagtttaatcataaggattcgtgacagcgttctttgtacacttgtacagaaacatgatgacataccgagtctggattaggacattgtttcaaaatctctctaacctaagtgggattgctatgtttgcattactatatgacaaagtaagacacggcactgttctgaacattttatttccaatgtatcatcatctttcatcacaacaaagcaaaagtatcaatcggttagtctcactttaacgctcgatcttattttggcattacaaaagcagcacttgccctttgcttttatctgatcgacgcagtcttcgcaaaatgtgtgaccgcaaggcactaatgtatgatctttttgtgcagacaagcatatgatgcatagcatcagttcgtcccttgcctcttgctttgctttagacagtgctctctgatgagccaacagtagctcatgttccctcttttcccaagccgtttcggtcaacgttgatgaaggcctcgtataaggttttagcttgtgtatcggactttttgatttcgtactcatggtcggactgatgatgtctggcaactcgtcattgtcctcatcgcttatgacgatggtgtctgttagtgtgatctgtttcttcgctttgtccatattgtctgaaacagaaaacataaacgaacgtcagttgttttacaaaagttgttacatggtcaattcaacaagtcagtattagctagtaaaagtatcgagttcaatttcaaattcaaactgtcaaatctcaaagtgtcaaatctcaaagtgtcaaatctcaaagtgtcaactcaccaatttcatccctcagcaacccttgattctccaaaaggaatctcgcagcagctattacgtccgacatatctgtttcgttcgtcgcctctctgatttcgttttcccacaagttcagtttcgatagtgccgacatgctactcttgaataaggaagggtatcgtccgcgatccatgttgacacaagttacgacgttatctatgttttcgattaagttttgagctcttctcactatgcctcttcgcttgtataagacaaacgtttccattgcttgtcgacggctctctgtcatgagtgagctcagtaaatctgcgactgcactgttcatcgttctgatacagaatgacactaagaatgcatatgcacacactccctctagcgaaaattgtttcgaccaatcagaacggtttgcttaaaccacgcctactttgtattaaccaatcagaaagcagattgattgaaaaagttatttttcggtacagtacaaaagaaatcgtaatattagatatcgccgcatagatgcacccaacttcaacatgagaagacgtgacaataaatcgagaaaaatgtgtgagtactgtaaagtggatatgaatgtgtcaaattgggtgaagcacatcaagacaaagaaacatttgtctgctatagaaccaaaaagtaaaaaactcaagaggaaaatacgagaaggtaaaggtgtacacttcatgttgactataaaccaaggtatgaagaagtacaagttcttgaagaagatggactcgagaaatatacacaacaactggatacggagttatgtcatctgtaacgagtttggaaaaagtgcagatgagaataagggtcactctcatgcatacatacaaactaaaaagaagatgaacttcaaaacttttaaagaaaagtggatgaagcaaatgaggttcagttgtggcataattgaacgtgtgaagaaaatcaaagatgtgatcaagtatgtctccaaggaagatgagaaaaccatctacgccaatgtggatacagactatctctcattgaaagtcagagcttatatgtatgctaaactgagaggtactcaaaatctggatgagagtgactatccatatcgcagtttaacattagctcaacgacgtgtattccgtgaacacttcgaaaacttcagtcaagaaaacatagttgacgaaatggtattggatcttgaaaacgtaactttaagaccatggcagaaagcagcattgaaactcatagcaatgcaaactgatagacaagtactttggttatgggaagaaacaggaaatgtaggtaaaaccttattaggagaatacctatgggcataccacggtgcaatccaacttggcaacggtaggacgatggacctatcatacgcatacaatgaagaaccaatggtcataatggactatcatagatcagaagtggaacatatcaactatcatttccttgagttactaaagggcggaagactgttcagtacaaaatacgggaataaagtaaaagaatttgatccacctaaagtagtatgctttgctagcttcaagccaaacctactcaaattgccagaagacatgtggatcatatacaaaattgaacatgacagattaaacatagatatggaaaataactctgtagtattcgacacaatggcgaattcctttgctttatctaaaccaaatgcaagagaacaactggcacactttgccaaaactggtgaagaacctggctttataaaagatgcaacaaagagacgaaggaaatatccaaattgtgcaggaccagactgcaaatgcaaatggtgctttgatgatacatatgacatatatgattctgatgatggaatacatgaacacggaaacagacaagaaaaagaagcagagctcattcaaagaggtattttgaaagctaagaaaaaaacaggtagaaaagcacaagaagcgcgaacaggaaaagatggcgcttacattattaataaccgaaaatggaatgatatatgtatgacaagatgttacgagatagaagacatgttttggttgaattactgaattactgttaactttttttagcactgagtaataaacatgaaaaataatgaatgtttccagtaacactatccctaaaacaataaaagtaaactcaaaaaagtcgttatatgttcttagacataattacacagtcagagcgatacagaatgacactaagtctgcatctgcgcccactctttctagctcaaaatgttttgaccaatcagaatgtggcatttaaaccacgcctactttgtattgaccaatcagaaagcagatagattgaaaaagttatttttcggtacagtaccggggaaatcgacactttggcttcagtctactgactgcaattgtactgtcaagatgcaaaacaattcttctcaacaatttagcaagatgaaagttaacataatcagcattgaaacactgagacagaggtctcgaactctggatatgctactaagaaacgaagatgacgaaaataagaattacaacgagacagagcatacattgttgctcagcagatgtcatcaaagttatttggaagaacaactgtatggatttctttcagacgacgacatcgaatatctacatgtgctgttcattacggacttgtcgaatcctgaagtgacatatgagatagctttgtcgaaatatgatacgaaaatgttacttattctactggactactatgacatacaactgtggagagatgaactcaaaacctttgtcgcgaggaatgaacgggtatattggattctggctaatgcaacgtttctactgtcgtttgtcgataatgggataacggacaggttcatgagagaagtcgatcataagaaacattacaggcctatgccaccgtttgtgttttatcaaacgcctagaagaaacgcaacgtgtttcggggacatttataaagctattggcacgcgtggctaaactgatgttgatacatattagtgaattgaataaaactgaatttgaacatgtgcttgttatgttatgctatgatatgttatgtcaaccaacaagatcgattgtcacagtaatttgtccaatgctgtgcagtaaacaacatgccattcaactttcaaaaatacccaaagccctaacccttacctaaaatgtacaagactgtaagtcaatgccagtgattttgacaaggtctgataagtagtgcccattagtacgtgttatgagaaaaacaaaacgccagttgatattcgtcctcaagtaaaaccgacggtacatcattaatgcgattatagtttaatcacattcaaacttaaaacaaacccaactcatccagttttaacaactttcaaaaaaatccacctccataaacctaacctagcccaactccgaggaccaaacacatcaacagccgatttcactttggtgaatatatgtttaggacttagtcattgccggtaatacttccaacggatgacagtttatgccccttaatattatgttatgccagtcgatactcgtcctcaagtaataccaatggtacaaacttaaaacaaaaccaactttaacaattgcccagttttaacaatttgacctccataaacctaacctagcccaacaccgaggaccagaagcgacaagagccgattttgaaatggaaaaaaaaaaatgttacggtaaatacagtcgggaagtgaatgcaaattcatgcaaaggatagccgggctaagtaacgaaagagataaatagagacataccggcgcaaccaagaacaaaaaataatatttgagcaaattgtctcgtggcatgtataaatgttgtgcgttgcccgaatctaaatcaaaacatttcaatcatgtctactcatatcatatacgaaccttcggacgtattttccaaagactccaagaaaagaaattcgttctatacgaagaatcatctttgtacggaagaagaaatcagtaatgttctagacatttttcatagaactaacgatcatctagtagtgcatgtatcagtcaaaagtattcaagatgaaatatcttggttgggaatacaacgcatattatcgaaagtgaccatcgacgatcagtatggattttttacatacggagtgaaatagcgaaaaaagttactctagtatttgattcggaaattcctattttagaaaacgtaccgcatatcgacgaattcgtttacgatcaaaagcaagggatattcttatgtcgaacgatgaaagaaaagctcgaatggttggttgcattagaatgcgatatcgttaaaataaaatagtgtgccaataaatggacagtttgacatacataatacagactattttgactggaagttcatccttcagtcaaaatgaaaagtaaaagcaatttggctggaaataataaagcagtagtaactgaagtaattttaccaaagtatgaggatgctccatgggtcgatgctaaaatcgacttcgacaatgctaagaatataaaagagtgtttgctatgtggaacgatatcaatagaagcaaatttcaagacagcacccagatgcggacatttgtgttgcgtgcggtgttattttaaaattctaagaggatggtcgtgtttctgttggacgacgcatccctacaacatgtactatgacatgaaaattctaggtcctctggaagaatagtgagtcggaactgtttaaatgaattgactttgactgaacattgaacttttgactttgaacaataaaaccatttctgtaaagacctgttatcttgttctttcattctgatattgtttctccaatgttattcacttagccgtatcgtaatgtctcagataccgttaccgttcaatactaattataacattgttcatgcatgttgtgtaacatacgtcaacatctgcactgattgccttttgttaagaaaagtacgaccaaataattgacaaccaagcaacgagttgccaacacgtaaatcaaagtcataatgttacaactttcataccctaacattcacgcagagtcagaaacgtaataccagacccgtggttcagctacatgcaaaacctttgtcacagctccgtgcagaacccatggttcaacccaactatctaacctaaccagaaacaccactgttatagaatcgaactaatcgggaactgtatcaaatctgatacgttgtattattttgatcataaagggaaaagcattaacgttaatttcaaaagaggagcttctcatgacatgaaacggttacaatcagatggccgaaaaataatcttttatgttttcaaccatcaaattgtcctatataacaagcacgtcgtttacaagtcgagcaaaatcgagttttactatggctggtcagtaccttgcttttggaaagagtttcatgcttccatatcatgaaacggagaagattgtttcaataaagtcgtatcgttgggatgaagaagcagatgcatcaaatcaagtgatttcagaaaactcgaatggacgtgttcgcaacgtagatcaaatgatgatggagtttgcgaaaagaaagaaatgacactacttcttctattccgacaaaccagagtattctagagaaacgatcaaagaaatgatatgcaaagaatacaacggctgtgagataacagacatgaggagattcgcgagactcaaggaaaatgctcagttcatcattatagacaattttaatcggtctttaggactgagctaccaagacattaaatatctggtagatcaaggcagatacaaaaacaaaaaactacatattaagatcagacgcgatgcgcagttcattttcttctcactaaagcatcttttcgaaggaattaaacctgttcgtggaagaaagacagaccaatcatctataccttggtcacacgctcacaagatgttctcacgatttcatattgttaaattacacgaggacgataatgaatcagaaattatcgacggagcttctgggattcttgaaggagaagtcgatataaggagtgaaaattgtgaacttcgagcagaggatttcaaggattttgagtctcatcacagagttctcgtcgagaagtatatcgacaaaatcaaacaaactaaaggttatgatctgagacaacgcctgccgaagttctacaagagaagtctcatcaacttgtacatatattacaacgacaagcatcgacgaaatgactactaaacatttgacttttttaaaaagggttgtatttttctcaatggatcaaataataaaacaatgtagttgcggattattacctatttcacgaatgatacatctgtacaaatatcataattcaaaataaatggttatcacatttccaaagtcatatcattgttttccagttctcaatatctagtcagtgaatctcaatttcgatataaaccgaatatcactcctgcagaatgggcagtgtctgttatttagaaatgacctaacgatgcagttaacgcacataatatgtccacagggcactagaactacatttttctcctcatccaagcaaattctacattttttgaactcttgtagtgcttcttgtacattctgcacagctatttcagcagccaaagatagagtatccgaaacaaatgtttctaataaatttctgagagtgtcgacattaactgcttcgtccgcatcttctactacgtctataacatctacgttatgctctgactgcaaagtcactcttgacatctctgaaaataaaaatgaggggaatgtcagttgtgatataaattgatcatactggaatattatacgatacaactccaatttcaattgtgtagcgtcttgtaatacagatagttctaaaagtcaactatgtacaccaccataaacgtacctgagttagtatccagttgtcgttgttgctgtatcagaacagccaaaggtgctgcggttctgctcatgatttgtatttttgtgtttctttttctgatgcgatcaggtcgaaggcgaaagtcagaatgatgtagaaaaataatttagtactcaagacacaagaagaaatacatcaaccaatcaaaacgttcgatacaaaaagttaaccacgcctacttttttgtaacgacgtttctggttgaaggtatgcttttgagacctcggtttaaaggtaaatgaaacatttctgatcatatcaattttagctttctgactgatcagacgtataatttcatctcttagaactactcaatcgacttagaataaaattacatcgactcgcttgtaaggtaagcatctattttgcattactttgaaaatgtaactgatggaattacaaaatcaattttgtaatgatttgaattggcgctgtatctaatcattattgtgagacgagaacttatactcgtgtttcttttctacatcagatggcttttcattgcgaacgatgtggtgacatgccaacgttgacatgtgaagattgcttcaaggcactacagcatagaggacaggaacacgcgtgcagtaaggaaatagaaagaccgttttattgtctgagatgcacgttcatacaagagtccaagaaagcaacatgtttgatttgtggcgaaaaggcattttacgaatgtaaaggatgtgaatcgatcatagactatgatggacaataccataactgtccagaaaactgcacagaagcgttcactccaatctgtgataaatgcgaatgaactgtgagtcatcattgacggttaaaatagttaaccatatagttattattgtaccgagatgcttttttttttttatcataattgtcaattctacaagtaaaaatactatataaaagacttgtcttcgtgttttccctttattagtttgttagttttaacacattcgacccgcatgacgacttttctcgtttctgtcggaaccagcatcagtgaaacttttgatgaaaaaaaagtattaaagggaaatcgtgttttcctattcagtataatacctggtgtgcatcagtttactcctcacttaagaatgaagagaaaacgagaacagatgactttgtggaaagccgcgttcgtcaatggacgggaaacgttcaagtcatggattgacaaggcacgaatgctggaattgaactgtgacatctcttctgcaagctcgacacattactcggatctggatttgaaaagcaagtgtgctaagatagaagacaagtttatgtgtacattttctgtcggcattcgacctacttctaagcaaaaccgaactttgaaccagatgctgaaagtgagcaactacgcctacaattggtgtaatcacctagttaaggagaaagacttcaaacctaagcagttcgacttgcaaagagtggttactaaaacgaattcgcacgacgttccggccgagtacagacttcccggagacgactggtttttcgacaacaagatgtcttctatcaagttgaccgcctgtaagaacttttgcaccatgtacaagtctgctcgaaccaatcagaagaaaacaaaggtcgatctcagaaacaaagacactgctttgttacgcgaaggatcgttcgaagtgcagagacaatacgtgaggttgctaacggaaaaagacataccagacgaacgaattcggcaatcgagaatagccttaatggcagacaacttttcgaaatccaagaaggactggaaagaaaggtttctccgactttcgaaaaatgtgtctaagatacctcctttaaatcacgacatgaaagtgtgcaaacgtccgaacggaaaattcatactgcaaattccatgcgatccaatatgtacgcgacagatacaagtgcacacctcggactcgatatgttccatcgatcctggaggcaggacgttcgcgacgtgctacgatcctagcaatataaagacatttcaaatcggacctgaggcagacaagaaggaaatcattcacaaattccacaacaagatcgataatgttcaccgtctcttgtcatatgctcaaaagaaaaagcagacgcaagcagtgcaagacagaatcggacagctgaagaagctgcacttgaaactgaaaacgtacgtcgatgacgtgcacttgaaactgtgctcgtacctggtcaagaattacaaactggtcgttcttggcaggatatcggtttcgtccatcgtgagaaaagacagaccgaaccatttggccaaaaaaggcaacagggacttgctgtgttggcaacatttcagattcagacagagactgttacatagagttcgtggcacggactgcgaagcgatcgctcaagacgaacggtacacttcaaagacatgtggtaactgtggagtgcaaaacaacaaactgggtggaaatgaaacgtttcattgtaaaagttgcaactacaaaactcacagggacgtcaacggagcgagaaacattctttgcaaatacttgggacattttccatttgctacataaaacaaatgatatttgctttttagggctcgattctttgccttctcgatgcatttattgccacagattttgctaatgcagtttctgaggcaagaatgtgttcgggtaaaaagagttaatgggcaaactatgaaagacttggctctcagttgcaagaaatgctcaaatgcgcttcaaatgaaatcaccattgaaagtgaactacgcaaaacgaatcataattcagggtgacattacatatccatatggatttcagttctgatagaaactattcgtttcaaccgcttgtttgcacaaatttgtgtgcctgtttgttttttgttttcttctcgtttgctaaataaaacatcaaataatgcacttttgtcatagttatgttttccgatcaaaatcatttagtatggaaggtacattcaaaaataaagactaagacgacaattttacatttgataacattgtttatttagttcaatatctagtcagtgaatctcaatttcgaaatgaaccgaatatcactcctgcagaatgggcagtgtctgttattcacaaatgatctaacgatacagtcaacacacattatgtgtccacatggcaccaaggtgatgttcttttcattatacaagcaaatccgacatttcttgaactcttcgatagcttcttgaattcgccgattgatcatatttgttgctcgtgcaaaggtgtccgaaacaaaagtttctaataatcttctgagagcgtcgatatgagcatcttcgtccgcgtctgctaccacgttcagcacatctacgctctgctctgactgtaaagttactcttgacatctctgaaaataaaatgaggagaatgtcagttatgatgtaaaccgatcatactggaatataaaacgatacaacttcaaattcaaatctgtagcgtcttgatatacagtgacaagttctaaaagccaactacgttcaatacataaacgtacctgagtttgaatccagttgtcgttgttgctgtatcaaaacagccaaaggtgctgcagttctactcatgatgtgtagttttttcttgtgtgtgtacgtgttttttttttttttatctgaaccgttcaagtcgaaggcgaaagtcagaatgatgtagaaaaataatttattgctcaagacacaagaagaaatacatcaaccaatcaaaacgttcgatacaaaaaagttaaccacgcctactttttgtaagaacgtttctggttgaatgcttgtattttctgacgttggactgaagtttttaagtcatagtttgaccatttcagttctggctctcgaatacataagaagtaattttcttatcagtattttcaacgtagacgaatttctatagatacttagcattcaattaaggttagtatatttttactttgatattttctagaagtataacactctcataacacttacattttcaagatctgcaatgtaacaatgattcagacttggtttaactaatacagatagctgttgcttgtcactgatagctatgttctatatttcagaaagatgtcttttaattgtgaaaagtgtggtcggacaccagaagtccaatgcagtaattgctttcaagcgctagagtatgaatttcaacaacacaactgcatgatgcaaattgagagaccattcatgtgcattcattgcaagcaggtggaaacagtgaagaaagctaagtgcatgaactgtggtgaaaagactttctacgaatgtagcgaatgttacagcgttatgaactacgacggggaggaccacaattgtcctgataactgcacaagtgctttaccaccaatgtgttccaaatgtgaatagaaggaaacattgtttcatatacaaacgtaataattataacacgtgtacgatagaaatataagaatgaacgttgagtcatgtattttgatataatgtaataaatttggctacaagtaaaaatactatataagagacttgtcttcgtgttttccctttattagtttgtcagttttaaacatggccgagtctgatcctaatgttgaaaatgtcagagtgaagattgaaactgtattacaagacgcctttagaaaacactcgctcatatctgctcattgtgactacttcgatctagaattcgaaatgaaacttgtcagcgtagcagaaaatgaaattatctgtactaaaatgaacagatacgagatcgaaatcaaggaaatggaaccaacaaatttccttactctctttcttgcgttcagatgctttttcgcatcaatagttgagatattgaaagaagatttggtagattcagatcgagttatattggcattcgacacaccttcactggtcaatcaagtcgttctgcctatgatggcaagttctgaaatgacagcggaccaaattcttgattcgatccaggatgaagttgacgacggcgttcactttgaattgaagaagtatctcacaattcaatgcttcagaattagagacaaagatgaacagaattgagaaaagaaagaggttaccaatactgtaacataacataattggattcgaacgtaaactgaatgtgtatcaagttcctaaggttacaccttttgttattgaccaataagatattgacacttcagatttcacttcaataaaaatcaaagtcgctatatttatattgctgttttcaatctttctctctcatagcatcgtgtctgtattagaatatattacatactctgactgttcagacttaggccactaatcaccttagaccttcaagatgaatacatatacgacatatccaatcagataagttttcaataatgtccattttataactgtggtgaatctggttaggctagatagtacggaagaatattgggtaaagtaaccagtgtgcttagagttagggctagggtttcagacgcgaggcaaaacagtggacgttttctgttgaacaatactgttgttgttgttctgtttgaactgtcaaacatgtacgagaattacactaggatatacactaagcacctacatttaacaagtggcagattcgaatatcaatcttattgttagactgtggacacatcttttcggtcgttatcagtttaatactttcagttgtaacatgtacatggttcagaacacgtgacgtactgttggtgttttgtacttagtatacgtgttgacgctcttcagtacggaataagaactgttaaaattagttagaccaacatgtatcatataatgacaaatgaaccggctctgagagaaaatgtattcagttcacttattgtatgaatctgataaaatgtaagcaatgacatgaataagcataagaatatacgcacaaacaacaacaacaacaacaacaacaacaacaaaaggttaagttttgtacacatggctgagagtaacggcctacttgttattgttcacgttattgtcgttatcattcagtacattcatcaatagtatgtactacgattacaaatacattgtcgacatgtgttcgaattcacaaaatgagatagggttagggttttgttctacaagaaacactaagggctttctcgttataacaaattcatagtccaacactatgttctaccagtaattattcctgaactatctgatctaaccagattcaccaccgttataaaatcgaccttgttgagacctctaatgaaattggatacgaccgtgttcgtttcttttctaaagcattacacttttgatcaaaaataagtatatatggtactgtataataccttgttttgaacagatgtacaacgttgacaatgccatctaaaagaagtgttgaaaatgtagatggtattgacaatgattgttattcaaagaaaatgaaaacgcacaatcgtgaaccgtttgatgtaagtagacgtctgcatttgaaacatgaaatgaaagtagataaattttgtactacattcagttcatacgaattgaatttagaggacttaaatatacagagtctacctgatgccatgaacactgtgaaagatatgtttgaggccgtgattgacgaagtgaaggctccattagaatcgtcagacttagtgttgctcaaattcaaaagcccatcgcacgattttcctatcagagttccattaactgagtgttcgtctttaacaggcgatcaggtattgaatcatgtagagggttcaattcactataacactaatttcatattagaacgttctctgaacatcgagagcactcgtattcgtttaccaaaaggtggtactaaaatgatgaaacctgaagtgaatttagagacgtttttacatgaaagcaagtctgttatacaaatacgaaacaaggacgacttgtgttgtgcacgagcaatagttacagctagagcaaagatagaaaagcatccaagatgggacaacatcagattaggttttggcgtacagaaagatcttgcaattgagttacatcgacttgccgatgttactgaaaagcagtgcggtattgaagagataaagaagtttcaggctgtaatgccaaattacaagatatatgtagtgtctaaggaatgctttaacaattttgtctatgttggtccaaatgatggaataccaatttatctgtatatgcacgataaacattatgatgtgataacaactatgaccggttttttgaaacgaagctacttctgcgagaaatgcttgaaaggatataacgacaaggagaagcacaagtgtaacaatgtttgtaaagtgtgtcgtcggtttcatgaggatgtgaaggaggaatggcatttttgttccgactgtcgcaggtatttcattagcgaaacttgttacaagcttcaccgtaagaagaacaaaggaggaaagtcaacgtgcgacaactggttcaagtgtagaaaatgtaaggcgctgatcaacaaaaagaggcgcaagacggaacacgtgtgcggcgaaagttactgcagaacttgcaaaggtttcttcgcgaaaggccacaagtgttacatgaaggttgtcgacatgttaagtaagagtaatgcgaattccagacaggtgtacattttcttcgagttccagagcagtgtggacgagattgttcagtgcgagtctggtttcgttactggagaaaacga

SEQ ID NO: 4901 - protein, 478 aa, Mercenaria mercenaria
MKRKRDQMTLWKAAFVNGRETFKSWIDKARMLELNSDVSSASSTHYSDLNLKSKCARIEDKFMCTFSVGIRPTSKQKRTLNQMLKVSNYAYNWCNYLVKEKDFKPKQFDLQRVVTKTNSHDVAAEYRLRGDDWFFDNKMSSIKLTACKNFCTMYKSAQTNQKKTKVDLRNKDTAQLREGSFEMQKLFVRLLTEKDIPGERIRQSRIALMPDNFSKSKKDWKERFLRLSKKVSKLPPLSHDMKVCKRPDGKFILQIPCDPICTRQIQVHTSDSICSIDPGGRTFATCYDPSNLTAFQIGPEADKKKVIYEFHDKINWVHHLLSCAQKKRQTQAIQDRIGQLKKLHLKLKTYVDDVHLKLCSYLVKNYKLVVLGKISVSSIVRKDRPNHLAKKGNRDLLCWQHYRFRQRLLHRVRDTDCEAVAQDERYTSKTCGNCGVKNNKLGGKETFICESCNYKTHRDVNGARNILCKYLGLFPFAA

SEQ ID NO: 4902 - protein, 272 aa, Mercenaria mercenaria
MNRAAANLLSSFMTKSRQQAMETFVVYKRRGLIRRAQNLIENIDNVVTCINLDRGRDPSLFKSSMSALSKLNLWENEIREATNDKDMPDIISAARFLLENQGLLMDEIGNSDRVKRQLLPTDIIAIDSDEEEEDDDLPDIISPTLMRTPTCTLKSNRPVKGIKGLHRLKPYSRPTSTVTSASSTSSTLSETVWEKRENEMLVAHQRELSKAKQEARDELLLCIICLSAEKDHTLVPCGHTFCKDCSHKSKAKGKCFFCMTKVKSCVKMRLTD

SEQ ID NO: 4903 - DNA, 6813 bp, Mercenaria mercenaria
  source 1..6813: mol_type = other DNA
agattcaggcaacgcgcaatatttatacgtgtcacgagacaatttactcaaatattattttttttggtcttgattgtgcctttctgtctcttttactcgttttaacacattcgacccgcatgacgacttttctcgtttctgtcggaacaagcattagtgaaacttttgatgaaaaaaaaaagtattaaagggaaatcgtgtttttctattcagtataatacctggtgtgcatcagtttactcctcacttaagaatgaagagaaaacgagatcagatgacattgtggaaagccgcgttcgtcaatggacgggaaacgttcaagtcatggattgacaaggcacgaatgctggaattgaacagtgacgtctcgtctgcaagctcgactcattactcggatctgaatttgaaaagcaagtgtgcaagaatagaagacaagtttatgtgtacattttctgtcggtattcgacctacttctaagcaaaagcgaactttgaaccaaatgctaaaggtgagcaactacgcctataactggtgcaattacctagtgaaggagaaagacttcaaacctaagcagtttgacttgcaaagagtggttactaaaacgaattcgcacgacgttgcagccgagtacagacttcgaggagacgactggtttttcgacaacaagatgtcgtctatcaagttgaccgcctgtaagaacttttgcaccatgtacaagtctgctcaaaccaatcagaagaaaacaaaggtcgatctcagaaacaaagacactgctcagttgcgcgaaggctcattcgaaatgcaaaaattgtttgttagattgcttacggaaaaagacataccaggcgaacgaattcggcaatcgagaatagctttaatgccagacaacttctcgaaatctaagaaggactggaaagaaaggtttctcaggctttcaaaaaaagtgtccaagctaccacctttgagccacgacatgaaagtgtgcaaacgtccggacggtaaattcatactgcaaattccgtgcgatccaatatgtactcgacagatacaagtgcacacctcggactcgatatgttccatcgatccgggaggtaggacgttcgcgacctgttacgaccctagcaacttgactgcgtttcagatcggacctgaggcagacaagaaaaaggttatttatgaatttcacgacaagatcaattgggttcaccatctcttgtcgtgcgctcaaaagaaaaggcagacgcaagctatacaagacagaatcggacaactgaaaaaactgcacctgaaattgaaaacgtatgtcgacgacgtgcacttgaaactgtgctcgtacctggtcaagaattacaaactggtcgttcttggcaagatatcagtttcctccatcgtgagaaaggacagaccgaaccatcttgccaaaaaaggcaacagggacttgctgtgttggcagcactacagattcagacagagactgttacacagagtccgtgacacggactgcgaagcggtcgctcaagacgaacgttacacttccaagacctgtggtaattgcggtgtgaagaacaacaaacttggtggaaaggaaacgtttatttgtgaaagttgcaattacaaaactcatcgagacgtcaatggagcgagaaacattctgtgcaaatacttgggactttttccatttgcagcataacgaaagaaattgacaattaattgttcgggttcgattctatccccagggctcgaaggcatttttgtcacagattttgccaatgcaagatctggggcaagaatgtctccgggtcaaaagagttagtagaacgaagcttagaaatgaaagataattcctttgtcttcatccattcgcaatctagctgtgtaacttgaaacttttcagtcccatctcgattttccaattgacaatgctactatttcagtgctattctttctcaagcaaaattcgctcgttttgacaagaatagttttgaaaaaattcgacttctttataaaactcatcctctgtttgcttcaatttcgtttcgaacacattggtaaaatactcatatatttcgaaatcaaggaaactggtgtttctgaacttcgctatttctgtagagttcagaacagtatgatcgtgtttgtatgagttcattttccagtagatgatatcaccaaatgaccagttcagaagtctttttagcatgacgagagattcgtcaaatttttccatgatgagaacaagcagaaactgtgagttcaattgatctaggtatttcctgatttgagatttatttgttggttcaatgtcgtgttgaaacccaaaatctttgcccatagaatttctcgtgtgagagaaaaatgctatatcgtacttgtctggatagttaacaagatcatgtatgaaattggcatgcggtactctcttcaggtagcctacaccaaaaacgtctcggtaatagtatgctgaacttatcattctctctactgggtcacgaacaattccaatgtataccgaatctgtcggtagtaagctgtcaaaccattgcttctggtacacagtgtgacatgcaaagatatcgtaatgttctcctgctttcaatggaattttctgtgacgctctattgagatagtttcctgacttcggtagtagaatattcaagctatgtctcatcccgaatcgaaaaagcacattttgcacagtagtcgatcctgccttgtgtactttcagaaaggcaacatgagttgtaacgtttttatgatggcgtgtagaatttccagtaggtcgttgtctgtactgcagtttgtctacaggcagtttgtctacaaacacaaccgaatgtttatagtaggtgaaaacgatacaatccatcactagtacgaataaggtaatcctgaaaagagaaataagacagatgtcaatactattagggttattccagtctttactacttcatataattcatgttgaaaaagtaaggtacttaccataggacgatttttagagcagatgttgttctgttaccattttccgtcatgtctttttcttcgggttgtactacgatattgctctgtaatatcaaattaatcataactcgtccctgtccttatgttttcaactctgattgaattttgctctttcgttcctttttaacctgtccgatttatccatcccggacattctttgtatgcatttttattcagttcctggctacatttatcaagacgtaaaattcagttcccggttacatttaccaagacgtaaattcaacatcccggacattctttgtatgcattttaattcagttcccggttatatttgccaagatgtaaattcaccaaagtgaaatcggctcttgatgcatctggtcctcgatgaagggctaggttaagttaagcgaggtcaatttgttaaaaaaaaatgttaaaaaactgtgaagttgttctaaatttgtcttagcgataaaacgataaatacagtaattatgtaccgtcagttttacttaaggctaataatcaactagctttatgttttttcacaacatgtaacgaggggcattaactgtctaaccttgggaaaattactggcattcacctacagtcttgaacatttttccaaaacgaaatcggctttggtggtgtgtggtcccaggtgtgtggctatgaaaagttaggtgaggttaggtgcggttagggtttttggctattttttgaacaatatgagggctactggctgcacagcattgggcaaattactgtgacaatcagtcttgttcgttaaaatacaacaaggcaaatattcaagtttatgtacttttattgcggttacgagtgccaatcgctgcataaatgtccccgaaacactgttgcatttcgtcgtaggcctttcgttgaaccgaaatggtggcatcggtctgtaattctgctttgcatctacttctgtgctaaatctatcaacaatgccatgatctgcaaatgataagagcaaaagtgcattgaagacgatccagtttgccctcttatttcttagaacaaagtttacgaattcgtctttccatgtgtctacagcataatagtctagtagaacaagtagaattctagtatcaatccttgacacaacaatatcaaagttcaccactggattcgacaagtccactacgaactgtttgtgatattgctcaatgtccccttctttcagaaatccgtcaagttgctctcgcaggtactgttcatgacattccccgagcgacaatatcttctctgtcttattgtatatatcgttgtgcgttaacagcatgtcgagagtttgagacctctgtctcagtgtttcgatgctgaaaactttcaccttcatcttctggaatttataagctgtatgatagtttgtaagcgtgttgacagtatgattgcattcgatagaatgaagctcagatggtctatttccctggtactgtaccgaaaaaataactttttcaatcaatctgctttctgattggttaatacaaagtaggcgtggtttaatgcaaccgttctgattggtcgaaacaattcttgctagatatagtgtgcgcggatggttttaactctcattctgtatcagaaagatgaacagagcagccgcaaatttacttagctcattcatgacgaagagccgtcaacaagcaatggaaacatttgttgtatacaaacgaagaggccttattagaagagctcagaacttgatcgaaaacatcgataacgtcgttacttgcatcaacttggatcgcggacgagatccttccttgttcaagagtagcatgtcggcgctatccaaactgaacttgtgggaaaacgagatcagagaggcaacgaatgacaaagatatgccagacatcatatcagctgcgaggtttctcttggagaaccaaggcttgctgatggatgaaattggtaagttgacactttcaaattgaactagatagctaatagtgattgacttttttgaaataaccatgtaacatttttagaatggtttaactgaaattcgtgttttttcttatttgtttcaggtaatagtgacagagtaaagagacagttgcttccgacagatatcatcgcaatagatagtgatgaagaagaagaagatgatgatctaccagatataattagtccgactttaatgagaacacctacgtgtactttgaagtcaaaccgtcccgtaaaaggcatcaaaggactgcataggctgaaaccgtactcaaggcctacatcaacggttacaagtgcaagcagcacaagcagtacattgtcagaaacggtttgggaaaagagggaaaatgagatgctggtggctcatcagagagaactttctaaagctaagcaagaggcaagagacgaactgttattgtgtataatatgtctatcagccgagaaagatcacacactagtgccttgcggacacaccttttgtaaagactgttcacataagagtaaagctaagggaaagtgcttcttttgcatgacaaaagtaaaatcgtgtgtaaaaatgagactgacagactaaatgactgacagatgctattccttcttgtcttatcatgatggcaataaaatgctaacatatcactttgctttgtttttactaattctgaaattcaggtttaaccacttctccctacacttatcatgatactatgcgatctcaaacttgagacttataatttgatctcagagtagacaattgaccatcagtttgaaatacaaaaaagatgttggatatttgtatgctttaaccaaaggactcgtttgtacaaagtcgctgttttgtcaatagtaaaagacgagccttttatacgaatacattcaaaaatgatcattgctttttgctttataattatatcaagtctattaggatatagcttgtcttaattaggcatctgtgctcttcagcatgtaaaaatatcgtgtccaattctccagtatgaattgacatttcgtttttcaatcataagctaatcagacatcggcctgaggtacgagcctacgtattcgttcagcatcgcaatatcacctttagaaaaatgtacagtaccaaatttccgtggctctgcatttaacgggcttgccaccgtcatgtttccaagtatcaccatctgagaattcaatgtagttgtttactaaatgtagtaacactgagattcaccgatgtttatactggaccatggctgcattacagaaatttgggatagagtgccaaatgacagaagaaacagagagaagaagtattttgaattttgaacgatcggtatctctgccagacattgtcatgcttgtccccgaacacctatcactacactcggatgaaagggctgttcaaaggtgatagcgagcgtctcaatagagaagtgtagctcttccaatgaacgtggaacgcacatgttatatctggcagacaatcatagcaatgatgggccaagtaattccctgtactagcgtcattgcctactgagcacagagtcgggctttagccatcattaacgcttgacccacgctgatcgtttgaatgccaaatagcgagtgtgtgtgaaaagaagtaagacagaggaagaagtagaagccaaattcgcattcaaattgaccagatcggtatattcgcaagacattggcatgccagtccccgaacacctttcgctacacttggacgaaagggctgttagtaggtgatagcgagcatctcaatagagaagtgtagctcttcctaaaaacgtggcactgacatgctatgaaatgcaaacaatcatcgcgatgacgggcaaactaattccccgcaccggcttcatt

SEQ ID NO: 4904 - protein, 269 aa, Mercenaria mercenaria
MELMILSLFQRTLLGVSGERYEIDKELQKGSNGKVFSGKRISDGATVAIKCLFKDFEPGQLPQEVRNCMLLQVTDVTGIVNMLDYCIDETSEDSRKIAIVFEFMPLDLYRLYEFTGMHSKAKRMHMDIKEENVLIDPETFEVKLCDFDSLASTYRLMTKRVGGTIPCLAPETVKKGQFFPTRSVTWNVGIMTYSLLNDLYRPWEIYKNQDVSKLVYDSEVSTLAKDFVASCLIKNVLCRPDLIMLLDNPWFNDDSDVEFTDDSDVDIPE

SEQ ID NO: 4905 - DNA, 11541 bp, Mercenaria mercenaria
  source 1..11541: mol_type = other DNA
ttgaaatttaatgttgaaacattaatagttcttcctctgacaacgtgatctgatttgttcaaggtcgtatataagtgtaaacattttttatgatcgcttatataaatagcaggcaaatagctgtcgctatataaccggttattcctttatcaagtttaatatcttcaggatatgacataccttaaacacttccttcaacgtattacaaagacttaacgaaagcatatataccggcctgatatcttacatcatttacacattcgagaactgcacaatatcaggaaagaagcaaaacagtggagatcttagaataaaaacgactgtaaaattctcatatataacggactcctaattaactgtaagcacatgactttatttgtaagcagaacaaaacaatatacaccaataatgacacgacttagcaagctctgttcgctacggttaagtcttaagaatcatacgacttacaacggatcatttatgtcaaactggaaattaacttattattatttctaaatggacggatactttagaaatatgattaatagtgtttcaaacgtccacccctcattgggattatgaaatcagtaaggcgttttataaacgttacatgaagtaagagggatttaatatttcttagactaccaaacgtgtgctatttattattacatgcatgttattgtacccctttatacttcccatgcaaacctcgcatatatggttttaaacacttctttcgaagtattgtattggaatctttggttctattctatgcaaaataaggcagagtattgcgtttactgtcagctcttcctatttttgttgggcagcctttattgatgtccgggtctttaatagaggaatattgcggtatactaaaaaggatagattaagacaaattgattttcgactcacaataattctttaaacttttggcgtaatacagtcagcttttgctccttctcgctttacactattcttctcaaattgtttatatgtactatcatagcacaattttgtaccattatatctcattttgatttccaactcaaatttaataaatgttagatatacataatatttctatcaatatattatatttcaaatgatctattttcagaatgtcatcacattggcaacaaaaatgtatagcagatctgaagcaatggacataacttaaacatactggaagtagttgatgtttgtcaaaacaggcttaagaatacttttttttccatatactgtgacttaatttcggtataacgaaacaagtaccacattacttttagttggactcaattttgttttagtatatttaatatctaataaatttacatttaattctaattctcagttgcaattagttacatggctgattggaacagcaatgagtcagacgtgataaatgaatgatctaaaaatatttcagctgtaatatatatctaagaatgccatttgcatgtaccagctaaatcgtaagactgtttaaatgtaatattgtaataatgtaactctaaaaatgaaagaaaaacgaaaagaaggtaagataggcaataatattgctggtaatggctaactttgttattaagctgctcagtgcgtttggatgtctttctgtaatgctaaagagaatgaggtatttaggaatgtttctcataagaaacaaagatctacattaccaactaagtgtgctttaagcattgaatgaaacatttatttctgtcctattttgtctatatttaaaacgaattacaagtaaatgtttaacaccttctgtatgctctctatgtttagaacaatttgagtcctggggttaatagttgccaaaaatataagaattcaaaatctgcaggagtttatataaacatcggaatctgctccgaatttgctaatctctaacgaccaaacatttaaacgctattgtagccactgttgtattgcaaacagaggtaagagggaaattaatgaataaaataattgctatcatcaccgttcatttatctttgttttattgaattccaccagcgagttttatttatgacaaacatcgtccatcttacaaaaacggttggctctgtgacaactcatatacctgaaacaatgtgacatagaaagaagtattacaaatatcgacaagaaggaaccatattcagaacaatgtttaaaatttgtattgactgcctgctcttttcgcacacaggtaactttctgacttccaaactttctatgctagccattaagcgccccgtccgtgttgtaaaatgcccagaagggtatcttaggtcttcctctaccatagaatgcttgaaagtcgccatgtgacctataactgattgtgcaaattaaaccctacaaaaacaaacaatacatatgcttagtgcagatacataattcatctaagtccagacagacaaatatacatatctaataatgaggattcaaatcgtagttttatttcatattttgacctagaaaaacaacatagatatttctttttacatattttaaggatgtatgtttttccagctgctttatggtatgtaagtgtacgtgtctgtctgaaacatgaatctgtacggacgacattgtaaaaacctgtaataccactttaaatgatacagttagagaacaaactgagcagaacctgaaatggcaacattatagttataaatcgcatgaaatgatgcataattgatgtttgcattttatactacctatggatctagttgatacaaagcatttcctctttgtcagtcagaatcatagcgtttcatcggttacttctttaattttcaatcttgatgtacctgtacggaaaagaagtactaaacgctatttgaaaccttagacttgtataatatattaaagtgtatgtctcttttattaatgtcaaaccgtaacagagcaaatgaaaataagactcgaaaacatgttaaatatggagcgtacttttttaagtaaggaggaagccttacgtaacagcataaaaatccatatttttatttacacgtccgacagagatggatgtcaaagacatacagacgaaataccactggacgcactgaagtacccgacctccttcagatcagcgtttgaaaatgttacggacgtgaagatttatgttaaactaattatgttagtctgcgtaaattaatatgtgtaactctcaatgagaacggataatggttacacacgtactatatgacctgaaccatttccgtgacagagtggttaaggtcgctgacttccaatcacttgcccctcactgatgttggttcaggcctcactcgaggcattgaattcttcatgtgaggaagccatccagcttacttgtgaaaggttggttgttctacccatgtgcccgctcgtgatgaaataatgcacggaggggcacctggggtcacgcccccttttttggttacggcgacgctgattggtcgaagtgagttttcgtccggttttggagtatataaggagttagtattcagccgatcttcagttgaaattcaacttctcagacaagacgcatgtcttacacgatctacaacattcagaattcatttacattggactcagcaaagaaagacattcgaagctcatcatgacttctcaggtacgtttgtttatttactagaattcataatccaagtattgtgtttgcggacgtttgtcaatatcaagtgtcaaccagtatgatttgacttgaaatggaactcatgattctttctttatttcagaggaccttacttggcgtcagtggagagcgatacgagattgacaaggagttacaaaaaggttccaatggaaaggtgttctctggcaaaagaatttctgatggagcgaccgtagcaatcaaatgtttgtttaaagactttgaaccaggacaactgccacaagaagtgcggaattgtatgcttttgcaagtaaccgacgtgactggaattgtgaacatgttggactattgcatcgacgaaacatcagaagacagcagaaagatagctattgtcttcgaattcatgccactggatctctacagattatatgaatgaatatggagtgaaagaggtccatgtcaaacggatcgtgaaaacggtgattaaaacattactggtatgcactcaaaggcaaaaagaatgcacatggacattaaagaggaaaacgttctaattgatccggagactttcgaagtcaagctatgcgacttcgacagcttggcttcaacatatcgtctgatgacaaaaagagtcggaggaacgataccttgtcttgcgcctgaaacggttaaaaaaggtcagtttttcccaacaaggtctgtaacatggaacgttggaatcatgacatattctttgctaaatgatttgtatcgtccatgggaaatatataagaatcaagacgtctcgaagctggtgtacgacagcgaggtttctactcttgctaaagactttgtggcttcatgtttgatcaagaatgtgttgtgtcgcccagatctgatcatgttgttggacaatccctggtttaacgatgattctgatgttgaattcactgatgattcagatgttgatattcctgaataatacaattgaaaaaaggtatatatatcgtttgtttctttgctttggtattttgtgcatccttgcaaaatgttagtaaacccctactttgggtgtgaaactcctgacttgttcctctatctgatgttggccatcacagtttcattcacaatttacaatagcattgctctgtcaaccctattttggcagttgagcaaaagaaaaaaagaacacctcgatatgaaacgtcaagcatggatgccaaatacgatatataagccggactggattactgcaaataaacacattcgacccgcatgaggccttttctcgtttctgttgaaacaagcattattgaaacttttaatgaaaaaaaggtattaaagggaaatcaaaattttcttattcagtataaaacttgttacacttcggtttactcctagcttataatgaagagaaaacgagaacagatgactttgtggaaagccgcattcgtcaatggacgggaaacgttcaagtcctggattgacaaggtgcgtatgctggaattgaactgtaacgtctcgtcggcaagctccactcattactccgatctgaatttgaaaaccaagtttgctaagacagaagacaagttcatgtgtactttttctgtcggtatacgacctacgtcaaagcagaagcgaacgttgaatcagatgctcaaggtgagcaattacgcttacaactggagcaattacctagtgaaggagaaaaaattcaaacctaagcagttcgatttgcaaagaattgttgctaaaacgaattcacacgacgtatcagacgagtacagacttcccggttttatgacaacatgatgtcgtctattaagcagacggcctgtaagaagtttgctgccacgtacacgtctgcgcaaaccaatcagaaaaaaaacaaaggtcgatctcaaaatcaaagatattgatcagttacgcgaaggatcgtttgaagttcaaagcaagtacgtgagattgctaacggaaaaagacataccagaggaacgaattcggcaaccgagaatcgctttgatgccaaacaatttttcgaaatctaagaaggactggaaagaaaggtttctccgactttcaaagaaagtgtccaagataccgcctttgagccacgacatgaaagtgtgcaaacgtccgaacggaaaattcatactgcaaattccgtgcgatccaatatgcacgcgacagatacaagtgcaaatttcatattcgatatgttccatcgatccgggaggtaggacgttcgccacgtgttacgatcctagcaatatgaaggcgtttcaaatcggcccggaggcagacaagaaaaaggtcatttatgaatttcatgacaagatcaattgggttccccatcttctgtcgtgcgctcaaaagaaaaagcagatgcaagctgtacaagacagaatcggacaactgaaaaaactgcacctgaaattgaaaacgtacgtcgacgacgtgcacttgaaactgagctcctacctggtctaaaattacaaactggtcgttcttggcaagatatcggtttcctccatcgtgagaaaggacagaccgaaccatcttgccaaaaaaggcaacagggacttgcagtgttggccacatttcagattcagacagagactgttgcatagagttcgtggcacagactgcgaagcaatcgctcaagacgaaagctacacttcaaagacatgtggtaactgtggagtgccaaacaacaaactgggtggaaatgaaacgtttcattgtaaaagttgcaactacaaaactcatagggacctcaacggagcgagaaacattctttgcaaatacttggggcattttccatttgctacataaaacgaatgacatttgcttttttatggctcgattctttgccttctcgatgcatttattgccacagattttgctaatgcagtttttggtgcaagaatatgttcaggtaaaaagagttatgattccgatgttgatattcctgaataaaaatagtagttgtaaaaaaactatatatgcgttgttaatttctttgctttggtatttgtgcatcctagtaaaatgttagtaaacccatattttggatgtgatactcctgacttgttcctctaccttatgttagcaatcacagtttcattcaccatatataatagcattgctctgtcaaccctattttggcaagagagtaaaagaaagaaagaacatctcgatatgaaacgtcaagcatggatcccaaatacaatctacaagccgaactggattactcctgattaaaaaaactatataaggattttgtctctgtccgtttctcactatttgtaaaccgtaatggaacatttactcctgctgtcactccttgtcttcggagtatcaaacgtatattcgaaggaatgcaattgtggtgacagttgtaatcagtccaagggaatagctcgatatcttacagacgagaagtgctatttccttgcaccaggtgaatcagttacatggaaaacagttccttgtcagtaataagcaagaagaggatttcatttgaaagctttattcaaaggcataacgacgagtgcaaatacttatattgcaaccgataacagctaccaactaaagcgttttagaagcagttgcctctcatcatcatgtaacaaaacagtgtacgtttccaactgcacttgtacgctgaacttcgttgagaatgtttggtctcagatgaagtacttttacaacacgtatcctgaagtgttttggacgatcgtcgctcttgtgattgttgtgacgggactgattatcctaaaatgcgtcttgtgctgatccggtagcacacgatgacgaatcagaagtacatctccgcttcttgtttcttttcgttccagtaccttatcgcgtaattctttgtcactttgtcatctctcgtaatacatatgagttgtatgttcattaataaagcatcgaacagataacattgatcgactttgttgttcagtccaacgttggtctcgtacaagaagtccagtgttggctcgtgagacacgggttgacattccagaaagaatagtctgaagttttcaaaatcggtttcgtccgtgcagtacagatcgtacgtcaaacacaacaagcagctgtccgtttcaatatcattctccaagtactgatggagatgcttcatgtaattctcgattccactgccgtctccagttttcaccagttcgaatatttcgtacacgaaaggcggatgagctatcgaaaaggagacatcgctattgccattcaacgtaaacctcgtccctgctaagattttaccctgacagtatgctctcgaacattttgtgtccaacagatgcaacttgtcgactagtggcatgtacatgggatagacgttgcattgtgtctcgagtagactgatgagcgacgtttgatcaggaaccaaagcttgtaggaacgtacggagatcatacacgttgacatgttcgcagttgtcactaaggtttatcgcgaagtccctgttacgctgactcacatattcaacatcgagataaggttttttggtcgagatatcaaacagcgttttcaacggctctatgagttctgtattgttcgaaccattctctgtgttacaaattatgctcaagtccgaaccttgaatcgacgaaatggtttcgctcacacagttgatctcgttgttgtatcgcatcaagtcttctaacagctcggtaccgatgctgtccatggtcgagccagaactgaaaagtgttacgaaaatacgcacgtgtttcacctgagagtgcaaataaataatcttttttacgaaatgttttatttggttctttaactcacggtaaccgctttcaccgagtcatttgctcgcacaccatgacgtgtgatggaagcattgttagatgagctagacgtgtctttgtacggtacggacacgaaacatctctgtaacaagcttagatcctcgtatcgagttgtggagcataatggcgaaaggctgcccgacatatatccgccgttacttgaaggacaagcaattctacagcttgttcgttcgttcacatatgggttctggcaagacgtttcaactcaagaagatcattaacaacctcaggcagtcggctcgtaattctagaacggaactgagagtgctaatcataacgcccaaacgcacgtttgcttcctacgtgacaagtcagctgacagactttgtcgattacagaaacattcgcagaccgtacagttgcaacagacatcccagactcgttattcagcttcagtcgttgaagaactttgacgagatagacaatgattcgttcagcgtacgcggctactctgtcgtcatactggacgaaacgcacagcatagtagatgagttgttttcggacctgtccgatccaaaagagaaacgcaggaacattttgttgttcataaaagttctgagatcgatacctagatggatatgtttggacgcacatctgtccttggatctgattcgcatcttcaaggaaatagacgacgagagcgaacgcatcaagtctcacatatgtttgattaacaggtttaggcgaaatgacttcaaactcgtgtttcatagaaaatgtctgtacaacagtctcgtaatcaggttgttgaaacagaagttgcacaagtcggacacctttggaaagtacaaatcgctgctgtgtacgcagaaaatcgcagacttagtacttgatgacaacatcggtctggtcgagaaactgtacaagaagatttacatgagagactttctgagaacgtccgatcgaaatgacatactggtagaactacacgatgcattgagtcgcggttacaagatctgcgttaccacggccaccaaacgccaagccattatgttgaagaatctttacgcttcgtgcaagttcaaagtcaaagcgatcacgggcgacagttccgaagagatcaaatctaagtttgctcacgatccggacaagttcatcagaggatgtcagttgttcgtatacactacggcgtttcaagttgggatagacgtgtgttctacaagaacgtacttcgacactcatttcgttttcatcgaatgctcgacacaagtcgcttcgccgggagctttcgttcaagccgttggtagaatcagaactctgaagagcaaggagtacaagatcatcgtgttggacactaacgctgaaaagcaaaacaagtcaacgttgtgtttgactatggacgatttacttccaaagtctcgcgatcagattttgtcaacaggtaaatccaacagcacgactagtcatgtgtgcagcatgctcgtcgatctacaccacaaggaaaaggcaataggaaacaatgcctttctctacgtgaacatgttcattcgactgttatcgtgcaaggccgagccttatgttttgatcaacgacaacatctattcgacagaggacgttgtcaactttcattcgtttcagtattcgagagaacaatatggtaaattcattgacgagtttattaaaacgtacgaaggtgaaatacagagcatgttagaaaaacatatcaacagaatatggcagaaactcgagtccagttcaatctatgtttcgacaattgtgaacaactttgatgccttcgtaaggatgcctgctgacttgagtcgaagcgaatgtcttttgaaagtttgcgaattcacaaacatgccgttcggctttcttcacatgtacgtgttcgcttcaatttctagttgcattacagatgacgtgaatcaggaactgatacagaagtatttcgaaagcggtctgcgaagttactttcatcagtgtaatttggtagacctcgaacgtttgaagtcactagttttgaacttcttgacgacgtgtagcaataaagattcgtgctgttggaaaatcgacatgtcgcagtatcttgaatttctgcaatgtgaacaatcaaacatcgtgttgtgctattccagattcgtgagcaaagtcattggaaaaacagtcacgaccagacacttgttcgagaagttgatggctagcagtatgcgcctgtatatccacaaagacgtcttggatctgaacaacatgtacgactacaggcgtgtcatcgacatgaacaagttgctaatatacaacgccaagcagctgaccggtatcggttacaggtgaaaccaacacgctaagtctgttgcaaagtacagtgcgtacaaaaccaaaagcaaggtgaatgaaattttcaacatgaattcttcgtgatccattttgataacgaccgttcacttgtctagaaaaagggcaaggttctgcctaaatacttatttttgaagctcgacgaacacaatcccacagtacgtcgacgaatctaattttaaaaaaagacgtcgtcgaaaccagttacttgtccaatgcttcaaacataggtcaaacactcggttctaccttcaatcttagcctttggcccatcctgaggctcaacactactacggtaatatggaactgggaggatgtagaaaatatgaaatattattaattggcagaatccagacttcaaaaggactgacatcttcagttggatttcaattagagtcatggcatcaacgaacaaacacgtggttctgagttgtcgagatgaagatacgtacatcagcactgttcacttgttggtcaatgaatggcttgttgacaacctgaagaactatgcaccgccgaaggaaaagtgggagatcgacatgatcagagatatcaacgatactcaaaaccagagtcgttccttcagcatcattaaaggaaaaggatgtcaagacttgcttcaacgaacttgtgcagctacatgtaccggctcatttggtgaacactacatcgcacagagcttggcttaggttcgtgcttgaaattctgaattcggcaggtgtagaatttgcttcagagatgaacgatcgtatcctcgaacatgatctaagtaagtacactcacaacgaa

SEQ ID NO: 4906 - protein, 274 aa, Mercenaria mercenaria
MMNRSAVELLSTLMTKSRQQAMETFVLYKRRGLIRRAQNLIENIDNVVTCINLDRGRDPSLFKSSMSALSKLNLWENEIREATNDKDMPDIISAARFLLENQGLLMDEIDNSDRAKRQLLPTDIIAIDSDEEEEEDDDLPDIISPTLMRTPTCTLKSKRPVKGIKGLHRLKPYSRPTSTVTSASSTSSTLSETVWEKRENEMLVAHQRELSKAKQEARDELLLCIICLSAEKDHTLVPCGHTFCKDCSHKSKAKGKCFFCMTKVKSCVKMRLTD

SEQ ID NO: 4907 - DNA, 11532 bp, Mercenaria mercenaria
  variation 10066..10165: note = n is a, c, g, or t
  source 1..11532: mol_type = other DNA
agattttcctcagcatatttcttgagagagagaaaaaaaaatagattttcatttcaacaagcataatttcatttcagcttcatatgttttcattgaattactttgttagaaaatttgaaatgccattcagtcttatatttttttctctattacaggtagctagagcagagaccagatgctgtgattgatgcaaacagagatagacgttttacaattgaaatgatagactctgatatttgcatgtattgttttgtatgatgaactttgtccgtgcaagtggctatgcccgtaaaagaggcacacttttgctcattgagtttgttatctttttaaaaatatataatgtaatggtagtctccgagatgaaggtttagtgttgttagtctgtatcatgagcctaatagcccgtcctgtctgtccgcaattaatactttgccagcttgtatgctaagtatgctatcctaatgaaatgttaagagacactggcattcaccagtgtgagtaaacatgttcactcatgctggtagtgcctttgtgtattaagtgtacttggtaggcaagtgtggtctatcacatctcggagatacatataattagatcaagtaagggtcgttgacaaagataaaatgagacgtgttatactatttaactatacttctgagatactcagtaaggtagacggtccttcaaaatttcaacagtttgaacaacaaaattcttgatttctgactgatcatttttcttgaacgtctcattttatctttgtcactgtgcccttcatatatccaaccccaggctgctgcatcgaaattgcagtcaaatctctggtactcttggtatgatgaaaatatgtagcacttacaaagtatagtctcaatgcgataacttgaacattatgtaagaccattacaaaatcctagagatgtctcttatcaaactatcaagtaagttgtaatgcaaaatcattacaagactagtatcaagcaatcggaatgtcaaaacataaggctataccagagatttgaaatgcttttcgatgcaatagtatgatgttggaaatttatcctacatccaaccgtaatcctacatgattgtataattgtatcatagtccttacctgatgttgagcattttttcctcccttgtttggatttctgatcggcatgggttaagtgtgtccttgcatgcccattgcctttgcattacaggacaaatttgacaaaacagtcgagctgatacatgatagggtcagatatgattttgtcctcctattacaacatgatgatacatttggaatgtcaaatgtattgcattgaacccagcctttaagatctggtgggagaaacttctcctgaatgtcaaagcaattgtatccttgtatgcccattacctttggtcaatactgtatgcttgagacatttcatacgtcgtcaagtttttcacaacagagaacatgaccgcccttttaccttgtggcagctaaagggcgaccttagtcagatatgattttgtcctcctattacaacgtggtgatacattaggaatgtcaaagcattgtatgcttgcatgtacgggacaaactttccaaaacagcccatctcgatagttttacattatatgtaggatttcatgtttggtcaaacagcatcagtgacactatacgaatctgtctaatgagggagagacagatctcccaatatggtccataccagttgtttttaagtatttaaggaaaatttagcattggccgtttcaagtattgtgaacatactttgggacctaggactatgtcaatctttgccagatcaaatcatttcatgttgtcacacaactagcgagagcaatgcaaaaacacgtctgctctcgacggctgtacaattggtcatgtgaccacttaaaacttgaggaaaaaatgctcgacgctgattggctagttactttttgtgtagactcgtcctgtgggacaaaactaattttaaagctatcagccaatcaaatcgttcgtgacgtcacagttagttatttttcggcaggcgagcctttaaaagcggctgcacaagctcagttgttcagttggtcgggcggatttcaccaaaatttcaaggtgtttccgcgtcagttttttttaattttttcttgtgttaaaatgttcaagtatggatttgaaagtgttattcgtggtatgtgcagtacaagacagatgaagaatgcctggggtgagtactatggcaaagtcgcgtcgctctcgaaatgcatatgttaggacttggttaggtcataagactggcaacgcacattggcatagcgatgccaagtcttggttcggctagaacttgatccggggtttcgatcaattgagaatgtccagtgttcggcgtagttgggttagggtgaggagactcgatataccgaaaatggaaagacggttgagctcctgtccccgtcatcccgaccaatatctttccagcttaaaatagctggagttctctcttgattgaaatgacactcgagttgatatacttactctcgaggtcgtctgagtgtctactgtttgagtcttgcatcatgttgatgctgctttccgatattgacggtagacatggtcacctgttgatcgttcagtgcttttgcagatcgccagaaaatgcgatagccaattaacgaaccacatttttttccttcagcttttttgcatgttaggagcaatgacaagttgtttgaaacgagagcgacgggacctttgcaaccttagtataagaatatttgctagttatgtcttagatgttagttgttaagtcttaaagttgtgcacaacttattgtagctattgaatgtgtttctctccacagggctttgtcactttttatcattggtggtggagtacggcaaggggcgttttcatatccttacttgtttagcttaattcaagaaaacgactcttggcttgctcacactgctaaatgataacataagtgacatcaaaatttatgaactttggcaaacataagatcttacttgtaacagaaaaaaatcaaagcttcaaattcaatgttgtatcaagtgtacagcttatttggcatttaacagctgtacataaaacgatgcaacctttttctctcttctcttgctcttcataaaaacaaaaatcaaaattactaatgctaatggaccgaacggcaaccgatatcgctagagttgggctaagtttaggcaaaacaaaaaaaggacagtcaaaggtatggaggtgtcgttagaccaactttatgctatggtagggtgatgtgcagtagcataaggaaccgcctttggccatcacgaggcgttacaagcttggtaaagtaggaatctccccgtctagtgacaggatctggtcttttgatgtccgctaagattgctagatcgggtatacacaccagctctgtatgccaaagggtgcctacttatgacaagcttgcaacgccatcctagtacaaaaaacttaatttttaagcccgactctggtgtatgtcatgtcgaaatttcgaaactttggcaaacacaaatctctttatcttatttcaaacaatcaaaatcaaaaacactaatggaccgaacggcaaccgaaagttctcattcagattgactttgatagatcggcgcgggtaaactgtcaatgctggcttcggcccgactccgcacttggtaggcaatgaagccggtgcggggaattagtttgcccgtcatcgcgatgattgtttgcatttcatagcatgtcagtgccacgtttttaggaagagctacacttctctattgagatgctcgctaccacctactaacagccctttcgtccaagtgtagcgaaaggtgttcggggactggcatgccaatgtcttgcgaatataccgatctggtcaatttgaatgcgaatttggcttctacttcttcctctgtcttacttcttttcacacacactcgctgtttggcattcaaacgatcagcgtgggtcaagcgttaatgatggctaaagcccgactctgtgctcagtaggcaatgacgctagtacagggaattacttggcccatcattgctatgattgtctgtcagatataacatgtgcgttccacgttcattggaagagctacacttctctattgagacgctcgctatcacctttgaacagccctttcatccgagtgtagtgataggtgttcggggacaagcatgacaatgtctggcagagatactgatcgttcaaaattcgaaacactacttcttccctctgtttcttctatcatttggcactctatcccaaatttctgtaatgcagccatggtccagtataaacatcggtgaatctcaatgtaactacatttagtaagcaactacattgaattctccgatggtgatacttggaaacatgacggtggcaagcccgttaaatgcagagccacggaaatttggtactgtacatttttctaaaggtgatattgcgatgctgaacgaatacgtcggctcgtacctcaggccgatgtctgattagcttatgattgaaaaacgaaatgtcaattcatactggagaattggacacgatatttttacatgctgaagacccttgatgcctagtttagaccatttttgctttgaaattgacacaaacttaaaaacaaaaaaatcactgcttttttaggtgattagcaaactggcttgtttttcttaccacgacagaaatcgatataacacatacaaggcccataatttatgcaacgttttctccagtatgccttaacatttgtctataatacaactcaaggcatgatcatttctgtaatgaaagagttaaatcacaaggattcgtaacagcattctcgtacacttgtgcagaaaaacaggtgaatatgctaagatgttaaggctaaaatactagaaacacgcaaccaagaccaaaaaataatatttgtgataagtgtctcgtaaatggcataaaagctgccagctgcctgcattcagattaaacaacgactatgaatcgcaagagaagcctctctcctttaacgctttggaaagcggcacatgtgttcaagcaccaaaacctagagtgttggtttcaatttgcgaaggatggagaatcacacaacaaggtgtttgcatctgatttcgaacgaacaaggaagcgagcgaaactggaagacgaaaaaccattcatgacgactttcagtgttggaatacgtccaactcgaaatcagaaaagagtgctgaacgagatgcttagagtgagcaatcacgcgtacaactggagcaactatctcgttcgtgaaaagaacttgaaacctaatcagtacgacttgcagactcacgtttgtaagacaaattctagtgacgtcccgatggatttcagaatgaacaacgatgacgactggtatttcgataacaaaatgacatctattaaacaaacagcttgtaagaacttctgtaccatgtacaagtcggcgttaacgaatcaaaagaagaagaaaaagtacatcaagactgtgactttgaaagacaaagacgatatgaatccgagtcaaggagcgttcgaaattcaaaaacaatttattcgtacattgaaggagacagacactgacgataatgatatattacaccactgtatagcagccatgccggacaattttactacgcgaaggaaggatgtaagaaatcgattcctgcgcttgtctaaaccagtgagcaaactgccacctttagaacatgccgttaagatcgtcaagacagcgaaaggaaagttcgtcttacatataccatgcgatccaacttacacgaggagcaaacggtacgacgaaccattcgattctatgtgtggcatcgatcctggcggaagaacgttcttgacaatatacgatccatcaaagccacgggcatttcaaattgcatctcgatgtaaagcgccatctaagccagttcgtaaacggacaaagaaaaagggggaaaaatggcacaggaaaaagaaaagtcagcgccgggtcgggagcaccatagacaagattgacggtctgcacgcaaagatagactatgtaaattcaaaaatgcaagcagccatacggcgaaggcagccccaagcaaaagaagatcggcaaagacaattacaaaaggtgtataatcaactaggtaatgttatcagatgggtgcatcttcgttgtacatacaatctgatgcaatactcgtacgtagccattggagagatcggcatacctagtatcattcgaaggcagtgtaatggaaaacgaagacgtatcaacaaaaaatccgtacgccatctgacagtgtggaatcattgcaagtttcgtgaaaggctcgtgtatcgggccaaaggcacaaagaccaatgttatcgttcaagatgaaagctatacgtccaaaacatgcagcgaatgtggaacgataaacgacaaattaggaggcagcgaaacattcaagtgcataaatcctagctgtgattatattacaaacagagacgttaatggtgcaaagaacattcttaggaagtctctcggtatcggctcaattaaaacgtaccgtgcatgactttgaacactggaaaagtaagatcggttgactcgccgagttccggctgaaccttataggggaagcgttggtgaataaaaagggtcaatagccttgtcgtccgagtgaagtatcggggactggcatgacaatgtcttgtggagatactgatcgttcaaaattcaaaatacttcttctctctgtttcttctgtcatttggcactctatcccaaatttctgtaatgcagccatggtccagtataaacatcggtgaatctcagtgttactacatttagtaaacaactacattgaattctcagatggtgatacttggaaacatgacggtggcaagcccgttaaatgcagagccacggaaatttggtactgtacatttttctaaaggtgatattgcgatgctgaacgaatacgtaggctcgtacctcaggccgatgtctgattagcttatgattgaaaaacgaaatgtcaattcatactggagaattggacacgatatttttacatgctgaagagcacagatgcctaattaagacaagctatatcctaatagacttgatataattataaagcaaaaagcaatgatcatttttgaatgtattcgtataaaaggctcgtcttttactattgacaaaacagcgactttgtacaaacgagtcctttggttaaagcatacaaatatccaacatcttttttgtatttcaaactgatggtcaattgtctactctgagatcaaattataagtctcaagtttgagatcgcatagtatcatgataagtgtagggagaagtggttaaacctgaatttcagaattagtaaaaacaaagcaaagtgatatgttagcattttattgccatcatgataagacaagaaggaatagcatctgtcagtcatttagtctgtcagtctcatttttacacacgattttacttttgtcatgcaaaagaagcactttccctttgctttactcttatgtgaacagtctttgcaaaaggtgtgtccgcaaggcactagtgtgtgatctttctcggctgacagacatataatgcataataacagttcgtcccttgcctcttgcttagctttagacagttctctctgatgagccaccagcatctcattttccctcttttcccaaaccgtttctgacaatgtactgcttgtgctgcttgcacttgtaaccgttgatgtaggccttgagtacggtttcagcctatgcagtcctttgatgccttttacgggacgttttgacttcaaagtacatgtaggtgttctcattaaagtcggactaattatatctggtagatcatcatcttcttcttcttcttcatcactatctattgcgatgatatctgtcggaagcaactgtctctttgctctgtcactattgtctgaaacaaataagaaaaaacacgaatttcagttaaaacatatctaaaaatgttacatggttatttcaaaaaagtcaatcactatcagctaaaacaaaacaagtacaaatatctagttcaattcgaaagtgtcaacttaccaatttcatccatcagcaagccttggttttccaagagaaacctcgcagccgatatgatgtccggcatatctttgtcattcgttgcctctctgatctcgttttcccacaagttcagtttggatagcgccgacatgctactcttgaacaaggaagggtctcgaccacgatccaagttgatacatgtaacgacattatcaatgttttcgatcaagttctgagctcttctaatgagtcctcttcgcttgtataacacaaatgtttccattgcttgttgacggctctttgtcattaatgtgctcagtaattctacggctgatctgttcatcattctgatacagaatgagagtttaaaccatccgcaaacgctatatctagcaagaattgtttcgaccaatcagaacggtttgcttaaaccacgcctactttgtattaaccaatcagaaagcagattgattgaaaaagttattttttcggtacagtaccagggaaatagaccatcgagcttcattctatcgaatgcaatcagactgtcaacaccttacaaactatcatacagcttataaattccagaagatgaaggtgaaagttttcagcatcgaaacactgagacagaggtctcaaactctcgacatgctgttaacgcacaacgatatatacaataagacagagaagatattgtcgctcggggaatgtcatgaacagtacctgcgagagcaacttgacggatttctgaaagaaggggacattgagcaatatcacaaacagttcgtagtggacttgtcgaatccagtggtgaactttgatagtgttgtgtcaaggattgatactagaattctacttgttctactagactattatgctgtagacacatggaaagacgaattcgtaaactttgttctaagaaataagagggcaaactggatcgtcttcaatgcacttttgctcttatcatttacagatcatggcattgttgatagatttagcacagaagtagatgcaaagcagaattacagaccgatgccaccatttcggttcaacgaaacgcctagacgaaatgcaacagtgttcggggacatttatgcagcgattggcactcgtaaccgcaataaaagtacataaacttgaatatttgccttgttgtattttaacgaacaagactgattgtcacagtaatttgcccaatgctgtgcagccagtagccctcatattgtgtaaaaacaacacgccattcaacttccaaaaatactcaaagccctaaccctaacctcacctaacttttcctagccatacacctgggaccacacaccaccaaagccgatttcgttttggaaaaatgttcaagactgtaggtgaatgccagtaattttcccaaggttagacagttaatgcccctcgttacatgttgtgaaaaaacataaagctagttgataattagccttaagtaaaagtaacggtacgtaattactgtgtttattgttttatcacttaaataaatttagaccaacctcacagttttaacaacttttatcaaattgatctcgaacaacttgtcctagcccttcgtcaaggaccagatgcatcaagagccgatttcactttggttttttttttttttttttttttttttctttttacctactttacttagtcacacttatctcatttttattctcttcttgtccaattagttatgtataattcatatgacaattctgtcacaacatttatatatataatgtattatcatttcttctttagtctatatctgttatttcatatctgacataataacaatatcatttccttaaatttaatccaacgctttcccgtacttttctcacacaagacatttttagggtttcagtgcgcgggttacaactaacacatattttttcaccacttgtacataattttttatcttattttaatcgctgtacattgtactacatactttttatgccactaagaataatttgtcatnnnnnnnnnnnnnnnnnnnnnnnnnnnnnnnnnnnnnnnnnnnnnnnnnnnnnnnnnnnnnnnnnnnnnnnnnnnnnnnnnnnnnnnnnnnnnnnnnnnnggatgaaccacaatcaccacaattttgttagcttttaaagtaaataaaagcttatcatatttaactgcacttaccttgttagacattatttgtcacatgtcgcatgtgtgtgcttacaaatatactgattaattgatataatcaataggtgtgataatccaatcaaactctatcaggactactggtaatcagaggcatgtgtttgttacgccgcatatattcaaaggacattaattctgctttggcaataaatgcagtaaacgtttttatattcatatataaacatgatacaattcttttaaaaactgatttttcataatatattttcttcttaaattatcaaattaaacatgaaaaaataattcaattagttccgataataaactttccggtcagcgcggtttattcactgacatgtattttgtgtattattcatttaaaaatagaatatttatatacatctatatattcatatgttctaaaatatgcaaaatggaagaaatataaaatgaaaacatacaactatttctgaggggtcgaaatatcttggtgtcgaaatatctttggggtcgaactgtccaagaaaattaaattttggggttgaaatgtcttggggtcgaaatgtcttggggtcgaaacgtccaagattcgtatacacaaatacactaaaagtctgtgttttatagcagcatataacaatactgtttatgcgtaaagcatttatttttatacaaaaagacatgtacaaaaatgtatgtgtaacaatgtacaatacctagcgttgtacaaaataacagtgtaagacagaaagaacaaatgtgtaaactgcacaaaagggggataactcttgtgacataaattctaggatccgggattgtaagatcgtaaacaagcaaagaagagtcccgatctaccttgttatatgttgattaaagctacatgaggctgccatgttaagaaataactgattaacagtcatgtttgcaaagttctgcttatttctcatttagatttgaaacaatcgttttcaatcgtttatctatctatctatctatttatcttccatatagtcaaacccctgctggggacctagactttgcgcgtcaactagcaagaatgttaaaatgagtaaaaaaagtagtagtaaaaagaaagaaggagaatggttaaaaacaggttaaaaataggccaggtgtatttaaggtgagatgtgctcaatctggcttacagcctgtctgaacaatggcccagacgagttaattgacaacatctgagggcaaggcattccaatgatatactgttctagggaagaatgaaaatttttgatagttggatgagggtgaaacttgaacgaatgcctgggaatg

SEQ ID NO: 4908 - DNA, 11532 bp, Mercenaria mercenaria
  source 1..11532: mol_type = other DNA
aacatcttgtcatacatatatcattccattttcggttattaataatgtaagcgccatcttttcctgttcgcgcttcttgtgcttttctacctgtttttttcttagctttcaaaatacctctttgaatgagctctgcttctttttcttgtctgtttccgtgttcgtgtattccatcatcagaatcatatatgtcatatgtatcatcaaagcaccatttgcatttgcagtctggtcctgcacaatttggatatttccttcgtctctttgttgcatcttttataaagccaggttcttcaccagttttggcaaagtgtgccagttgttctcttgcatttggtttagataaagcaaaggaattcgccattgtgtcgaatactacatagttattttccatatctatgtttaatctgtcatgttcaattttgtatatgatccacatgtcttctggcaatttgagtaggtttggcttgaagctagcaaagcatactactttaggtggatcaaattcttttactttattcccgtattttgtactgaacagtcttccgccctttagtaactcaaggaaatgatagttgatatgttccacttctgatctatgatagtccattatgaccattggttcttcattgtatgcgtatgataggtccatcgtcctaccgttgccaagttggattgcaccgtggtatgcccataggtattttcctaataaggttttacctacatttcctgtttcttcccataaccaaagtacttgtctatcagtttgcattgctatgagtttcaatgctgctttctgccatggtcttaaagttacgttttcaagatccaataccatttcgtcaactatgttttcttgtctgaagttttcgaagtgttcatcgaacacacgtcgttgagctaatattaaactgcaatatggatagtcagtaggtattagatgattggttcctcttgccttagcatagatgtacgctttgactttcaatgagagatagtctgtatccacattggcgtagatggttttctcatcttccttggagacatacttgatcacatctttgattttcttcacacgttcaattatgccacaactgaacctcatttgcttcatccacttttctttaaaagttttgaagttcatcttctttttagtttgtatgtatgcatgagagtgacccttattctcatctgcactttttccaaactcgttacagatgacataactccgtatccagttgttgtgtatatttctcgagtccatcttcttcaagaacttgtacttcttcataccttggtttatagtcaacatgaagtgtacacctttaccttctcgtattttcctcttgagttttttactttttggttctatagcagacaaatgtttctttgtcttgatgtgcttcacccaatttgacacattcatatccactttacagtactcacacatttttctcgatttattgtcacgtcttctcatgttgaagttgggtgcatctatgcggcgatatctaatattacgatttcttttgtactgtaccgaaaaataactttttcaatcaatctgctttctgattggttaatacaaagtaggcgtggtttaagcaaaccgttctgattttagctagagagagtgtgtgtgtgtagttgtagtctcagtgtcatttcgcatattgcaatgccgaaggaatacgtcggctcatacttcgagccgatatctcattagcttactgtcgaaaaacgaaatgtcaattcgtgcttgttatttggacaccatatttttacatgccgaagagcatagatgcttaattaagaccaaccatttcataatggacttgaattacttgtaaggcaaaagcaatgatcatttttgaaggtattcgtgtaaaaggctcatctattactattgacaaaactgcgactttgtacaaacgagtcctttggttaaagcatacaaatatccagcattaactcataattgcagtgaaatcggcttttggggtgtctggtccttggtgtatggctaggaaaaagtaggtgaggttagggttagggctttgagcatttttgaaagttgaatggcgtgttgttttcacacagtatgagggctactggctgcacagcattgggcaaattactgtgacaatcggtcttgttggttgacataacatatcatagcataacataacaagcacatgttcgaatttcattcagttttattcaattcactaatatgtatcaacatcagttcagtttagccacgcgtgccaatagctttataaatgtccccgaaacacgttgcgtttcttctaggcgtttgataaaacacaaacggtggcataggcctgtaatgtttcttatgatcgacttctctcatgaacctgtccgttatcccattatcgacaaacgacagtagaaacgttgcattagccacaatccaatatacccgttcattcctggcgacaaaggttttgagttcatctctccacagttgtatgtcataatagtctatcacaagtatcaagaatctagtatcatatttcgacaaagctatctcatatgtcacttcaggattcgacaagtccataatgaacagcacatgtagatattcgatgtcgtcgtctgaaagaaatccatacagttgttcttccaaataactttgatgacatctgctgagcaacaatgtatgctctgtctcgttgtaattcttatcttcgtcatcttcgtttcttagtagcatatccagagttcgagacctctgtctcagtgtttcaatgctgattatgttaactttcatcttgctaaattgttgagaagaattgttttgcatcttgacagtacaattgcagtcagtagactgaagcccaagtgtcgatttccccggtactgtaccgaaaaaataactttttcaatcatctgctttctgattggtcaatacaaagtaggcgtggtttaagcaaaccgttctgattggtcgaaacaattttcgctagagggagtgtgtggatatgcattcttagtgtcattctgtatcagaacgatgaacagtgcggtcgcagatttactgagctcactcatgacagagagccgtcgacaagcaatggaaacgtttgtcttatacaagagaagaggcttagtgagaagagctcaaaacttaatcgaaaacatagataacgtggtaacttgtgtcaacatggatcgtggacgatacccttccttattcaagagtagcatgtcggcactatcgaaactaaacttgtgggaaaacgaaatcagagaggcgacgaacgaaacagatatgtcggacgtaatagctgctgcgagattccttttggagaatcaaggcttgctgagggatgaaattgatgagttgacagtttgaatttgaaattgaactcgatacttttactagctaatactgacttgttgaatagaccttgtaacaacttttgtaaaacaactgacgttcgtttatgttttctgtttcagacaatatggacaaagcgaagaaacagatcacactaacagacaccatcgtcataagcgatgaggacaatgacgagttgccagacatcatcagtccgacccagagtacgaaaccaaacagtccagtaagaggacacaagctaaaaccttacacgaggctttcatcaacggttgccagcagtacgttgagcgaaacggcttgggaaaagagggaaaatgagctactgttggctcatcagagagaactgtccgaagccaagcaagaggcaagggacgaactgatgctgtgcatcctatgcttgtccgcacagaaagaccatacactcgtgccttgcggtcacacattttgcgaatattgtgtcgatcggataaaagcaaatggcaagtgctgcttctgcaatgccagaataagatcgagcgtaaaagtgagactgactgactaaagtattaagctgatgttattcttttgcttcagtatgatgacaataaaacaaaaacctactctgctttgtttttttctacatctaaattcggatttaaccactagtccctaaacgtatcatgatactatggctatatctatatctcaatatccttaatctaaaccaacgtaatcagtaacaaatacttggacaccaggacatttcaaaatacatacagatgcgaattcaaactggagactaaagtagacagttgcccgtcagcttgaaacacaaatgtactcatccacttttgttagcagaatactaagcacatagtcaaaagtcactatgatttcgctctttagcaattagtgacaacataccttatgaaaaaccaattgcaattatgagttaatgctggacatttgtatgctttaaccaaaggactcgtttgtacaaagtcgctgttttgtcaatagtaatagacaagccttttacacaaataccttcagaaatgatcattgcttttgccttacaagtaattaaagtctattatgaaatggttggtctaaactaggcatcaagggtcttcggcatgtgaaaatatcgtgtccgattctctagtatgaactgacatttcgtttttcaacaataagctaatcagacatcggcctgaggtacgagccgacgtattcgttcagcatcgcaatatcacctttagaaaaatgtacagtaccaaatttccgtggctctgcatttaacgggcttgccaccgtcatgtttccaagtatcaccgtctgagaattcaatgtagttgcttactaaatgtagttacattgagattcaccgatgtttatactggaccatggctgcattacagaaatttgccaaatgatagaagaaacagagagaagaagactagcgaaacattatgttttcatatcccacattgcatataatcatgtacagtcgcattgtcagtgacaggcgagagagattgttgcaaccgagactaaaaaaataatatttgtgaaaattggcttcttactctcataaaagatgcatgttgccttagttcaaatcaaacgactatgaatcgcaagagaagcctctctcctttaacgctttggaaagcggcacatgtgttcaagcaccaaaacctagagtgcttgtttcaatttgcgaaggatggagaatcacacaacaaggtgtttgcatctgatttcgaacgaacaaggaagcgagcgaaactggaagacgaaaaaccatttctgacgactttcagtgtcggaatacgtccaactcgaaatcagaaaagagtgctgaatgagatgcttagagtgagcaatcacgcttacaactggagcaactatctcgttcgtgaaaagaacttgaagcctaaacagtacgacttgcagactcacgtttgcaagaccaattctagtgacgttccaatggaattcagaatggacgcaaatgacgactggtatttcgataacaagatgacaacgattaaaacagcagcttgtaagaacttctgtaccatgtacaagtcggcgttaacgaatcaaaagaagaagaaaaagtacatcaagactgtgactttgaaagacaaagacgatatgaatccgagtcaaggagcgttcgaaattcaaaaacaatttattcgtacattgaaggagacggacactgacgataatgatacattacaccactgtatagcagccatgccggacaattttactacgcgaaggaaggatgtaagaaatcgatttctgcgcttgtctaaaccagtgagcaaactgccacctttagaacatgccgttaagatcgtcaagacagcgaaaggaaagttcgtcttacatataccatgcgatccaaattacacgaggagcaaacggtacgacgaaccattcgattctatgtgtggaatcgatcctggcggaagaactttcttgacaatatacgatccatcaaagccacgggcatttcaaattgcatctcgatgtaaagcgccatctaagccagttcgtaaacggacaaagaaaaaggggaaaaaatggcacaggaaaaagaaaagtcagcgccgggtcggtagcaccatagacaagattgacagtctgcacgcaaagatagactatgttaattcaaaaatgcaagcagccatacggcgaaagcagccccaagcaaaagaagatcggcaaagacaattacaaaaggtgtattatcaactaggtaatgctatcagatgggtgcatcttcgctgtacatacaacctgatgcaatactcgtacgtagccattggagagatcggcatacctagtatcattcgtaggcaatgtgatggaaaacgaaggcgtatcaacaagaagtctgtacggcatctgacagtgtggaatcattacaagtttcgtgagagacttttgcatcgtgccaaaggcacgaagactaacataatcattcaggaagaaagctacacctctaaaacatgcagcgaatgtggaacgataaacaacaaattaggaggtagcgaaacgttcaagtgcacaaatcctgcctgcgattacattacaaacagagacgttaatggtgcaaagaacattcttaggaagtctctcggtatcggctcaattaaaacgtaccgtccgtgactttgaacattggaaaagttaaatcggttgactcgccgaattccagctgaaccttataggggaagcattggcgaataaaaagggtcatatgcacgcggtaaaatgattttgaccgtcatagttatttcgcagacttctctattttactgtttttttatggcgctaaaggtcttgtatacattttatcaacgaagacttttgtattttacaaaatgtttgaacctgtgcagttattgaaataagctgttttgtatcacaaatgtgcacaacgctttagatcagaatacaaccgtgtttggcagcaaaaaaaatgcatgttttcagaaaatagtctgttttatcgactgtaaagtgttacaagtacgttgtttatgccttgtacatttcaaatcaaagatatagcatgcacttgatagggctttgaagctgtacattcattgaactgggctgttttgaggcaaaaatgtgcacagtgtgtaatatctttgtaactctaggatttgcttgtaaatcatataagaagcagttctggctttgcattgtgtgttacaaatacagatacaacatttctctatctgaattaaatgttcaaaacataatgagtcattgaggcaaaggaagattcactgtttatacagtacacagttatacatcgaaagtggcaccgctgccactgtatatgagaacttataaccagaaattcctggttattgctcagatctaactgttcattgaaataaaaaacaaaacaatgttgaatgaacagtatgagactttatttactgaactgtgttacatgtttcatagttaagtcatttagtaaaaacatttattctatctccaatttcttacaacgtggtggtctaataataatgttaaaatgttcacgtagaccttttctgctccatccatcattttgggttccgtcctgatgttacaagtacaatccgaatttgggtccaaactgtgctcacaccactcgagttctatatcagaatgataagtactcatgtattttctaagcatgtacatccatgttgaataattcatatccaagtctgtccttatttttgttatgtcctcgtacttcacgtacagacacttctttgcagtcagaaaatcacgtaacgcgcactctacatcaatcaaatattcactgtctggtatgtttgagaagtccacattcaaacttgtcctgttcttgatgtaggctgtgaataattccatccaagtttctaccgaaattccaagatgtagtctactaatatttgcttcgttaatcgacaccttgtgatgtgtcggacacgcctcgctcagtacagtactaaaggaattcgacattgtgttgaataccgccgagctattttccatcttgtttatctatggtaagatgccatcctttcacacatttatatagtgcaaaatgttatataattataaattcgctctcaaaacatcgccctgcggcatgccattttttcccctttcaacacagtgaggcaccgccttgcaaaaaagtttcattatagcagcaaatgttcactaatccagcttttgacacatgcttcattgtcatttcttgtggcaggactctgtctctgactctgatgcatcatagttcaaacaacaacagtagtcgacagacacatagcacagcttcatgatggttaccaactgcatgtctgcagcaacaaatatgcaccaaaaatgaaccttcacctccataaaacacccccgatttaaagggggggggggtctttttccagtcattttttcttcttttcccgcacaaaaatcaatctcaaacaccccaccttcccacacgaacatctttttcaatccaactttttttcaaaaccgctcttgatgcatgtggtcctcggtgttgggcaaggttaggtttatggaggtcaaattgtaaaaactgggcaattgttaaagttggttttgttttaagtttgtaccattggtattacttgaggacgagtatcgactggcataacataatattaaggggcataaactatcatccgttggaagtattaccggcaatgactaagtccttaacatatattcaccaaagtgaaatgggctgttgatgtgtttggtcctcggagttgggctaggttaggtttatggaggtcgatttttttgaaagttgttaaaactggatgagttgggtttgttttaagtttgaatgtgattaaactataatcgcattaatgatgtaccgtcggttttacttgaggacgagtatcaactggcgttttgtttttctcataacacgtactaatgggcactacttatcagaccttgtcaaaatcactggcattgacttacagtcttgtacattttaggtaagggttagggctttgggtatttttgaaagttgaatggcatgttgtttactgcacagcattgggcaaattactgtgacaatcgatcttgttggttgacataacatatcatagcataacataacaagcacatgttcaaatttgattccgttttattgaattcactaatatatataccaacatcagttcagtttagttacgagtgccaatagcttgataaatgtccccgaaacacgttgcgtttcttctaggcgtctgataaaacacaaaaggtggcataggcctgtaatgtttcttatgatccacctctctcatgaacctgtccgttatcccattatcgacaaacgacagtagaaacgttgcattagccacaatccaatatacccgttcattcctggcgacaaaggttttgagttcatctctccacagttgtatgtcataatagtctatcacaagtatcaagaatctagtatcatatttcgacaaagctgtctcgtaattcacaacgggattcgacaagtccgtaatgaacagcacatgttgatgttcgatgtcgtcgtctgaaagaaatccatacagttgttcttccaaataactctggtgacatctgctgagcaacaatgtatgctctgtctcgttgtaattcttattttcgtcatcttcgtttcttaatagcatatccagagttcgagatctctgtctcagtgtttcaatgctaacaatgttcactttcatctcgccaaattgttgagaagaattattttgcatcttgacagtttgagagctgaagatataatgaagctcaagtgccgatttccccgatactgtaccgaaaaataactttttcaatctatctgctttctgattggtcagtacaaagtaggcgtggtttaaatgcgacattctgattggtcaaaacattttgagctagaaagagtgggcgcagatgcagacttagtgtcattctgtatcgctctgactgtgtaattatgtctaagaacatataacgacttttttgagtttacttttattgttttagggatagtgttactggaaacattcattatttttcatgtttattactcagtgctaaaaaaagttaacagtaattcagtaattcaaccaaaacacgtcttctatctcgtaacatcttgtcatacatatatcattccattttcggttattaataatgtaagcgccatcttttcctgttcgcgcttcttgtgcttttctacctgtttttttcttagctttcaaaatacctctttgaatgagctctgcttctttttcttgtctgtttccgtgttcgtgtattccatcatcagaatcatatatgtcatatgtatcatcaaagcaccatttgcatttgcagtctggtcctgcacaatttggatatttccttcgtctctttgttgcatcttttataaagccaggttcttcaccagttttggcaaagtgtgccagttgttctcttgcatttggtttagataaagcaaaggaattcgccattgtgtcgaatactacatagttattttccatatctatgtttaatctgtcatgttcaattttgtatatgatccacatgtcttctggcaatttgagtaggtttggcttgaagctagcaaagcatactactttaggtggatcaaattcttttactttattcccgtattttgtactgaacagtcttccgccctttagtaactcaaggaaatgatagttgatatgttccacttctgatctatgatagtccattatgaccattggttcttcattgtatgcgtatgataggtccatcgtcctaccgttgccaagttggattgcaccgtggtatgcccataggtattttcctaataaggttttacctacatttcctgtttcttcccataaccaaagtacttgtctatcagtttgcattgctatgagtttcaatgctgctttctgccatggtcttaaagttacgttttcaagatccaataccatttcgtcaactatgttttcttgtctgaagttttcgaagtgttcatcgaacacacgtcgttgagctaatattaaactgcaatatggatagtcagtaggtattagatgattggttcctcttgccttagcatagatgtacgctttgactttcaatgagagatagtctgtatccacattggcgtagatggttttctcatcttccttggagacatacttgatcacatctttgattttcttcacacgttcaattatgccacaactgaacctcatttgcttcatccacttttctttaaaagttttgaagttcatcttctttttagtttgtatgtatgcatgagagtgacccttattctcatctgcactttttccaaactcgttacagatgacataactccgtatccagttgttgtgtatatttctcgagtccatcttcttcaagaacttgtacttcttcataccttggtttatagtcaacatgaagtgtacacctttaccttctcgtattttcctcttgagttttttactttttggttctatagcagacaaatgtttctttgtcttgatgtgcttcacccaatttgacacattcatatccactttacagtactcacacatttttctcgatttattgtcacg

SEQ ID NO: 4909 - protein, 519 aa, Mercenaria mercenaria; identical to SEQ ID NO: 2792

SEQ ID NO: 4910 - DNA, 11532 bp, Mercenaria mercenaria
  source 1..11532: mol_type = other DNA
cagttgatcatgtgaccagtaatatacggtcagttgatcatgtgaccttatgatagatattgttgtcataagaaattttgcaacgaaaccatcatcattgtgttggaaatgtccgaactaagaaaatgaatggtcaaataatgagtttttattcaaaaacgaagaagttattgcgattttgccggtaatcacgtcattatataagtgacgtcattacgaatatgacgtcattaaagcggttgtcgcacacttatttttgtaaaataaattgccaaatatcggaaaatgaagtaatgacaagataaatagaataatatgttagtgcctaagatgaagaaagtttatctggctcggctccggacgttatcaggttcgccttcggctcacccgataacctcctccacctcgccagataaactttctcatctacggcactaacctattattctctatataattagatcaagtaagggtcgttgacaaagataaaatgcgacgtgttatactatttaactatacttctgagatactcagtaaggtagatgctccttcaaaatttcaacactttgaacaacaaaactcttgatttctgactgatcatttttcttgaacgtctcattttatctttgccactgtgcccttcatatatccaaccacaggctacttcatcgaaattgcagtcaaatctctggtactcttggtattgaaaatatgtagcactaacaaagtatagtctcaatgcgataacttgaacattatgtaaaaccattacaaaatcctagagatgtctcttatcaaactattaagtaagctgtaatgcaaaatcattacaagactagtatcaagctatcggaatgtcaaaacatgaccataaggctatatcagagatttgaaatgcttttcgatgcaatagtttgatgtgggaattttatcctacatccaaccgtaatcctacatgatggtataattgaatcatagtccttacctgatgttgagcattttttcctcccttatttggatttctgatcggcatgggttaagtgttaatgctggttatcatgacccgactctatatttggcgaggcagcgaagccggtatagggaattgcttaacccgacactgcgaggattcatggacagggattaaatgctcttgccccgccaaagggaagcacgacgttcctctaatgagatgtgcgaatacactctttggttgcctaactgtccggacgccgcagttagatgtacggggaagggcatcgaatgtctatccatgttaccggtccctaacattctagtgtttgatctggcaatgaaatcgtattacactatataatgttggaattttgtcctgatgcgtcacaggatagtaattatttttctcactatcctgttgctaaatcagtaagaaaacatgataatggaattttgtcccgatgcatttttctcctacaatccgtgaaattgccatcaatgcaaaaggtcactatgcttttctcctaatacccttcagtaggataaaacaacatgatgttgaacattttgtcctacattgttttcatcaaacgtacgtagtctttagcatctggtaggagaaacttctcctggatgtcaaagtaattgtatccttgtatgcccattgcctttgcattacaggacaaatttgacaaaacagtcgagctgatacatgatagtgtcagatatgattttgtcctcctattacaacatcatgatacatttggaatgtcaaatgtattgcattgaacccagcctttaggatcggtgggagaaacttctcctgaatgtcaaagcaattgtgtccttgtatgccaattgcctttggtcaatactgtatgcttgagacatttaattcgtcgtcaagtttttcacgatagagaacatgatcgcccttttaccttgtggcagctaaagggcgaccttagtcagatatgatgttgtcctcctattacaacgtgatgatacattaggaatgtcaaagcattgtatgcttgtatgtacgggactaactttccaaaacagcccatcttgagagttttacattatatgtaggatttcatgtttggtcaaacagcatcagtgacactatacgaatctgtctaatgtgggagagacagatctcctaatatggtccatacatgttgtttttaagtatttaaggaaaatttggcattggccatttcaagtactctgaacatactttgggacctaggactatgtcaatttttgccagatccaaccatttcatgttgtcacacagctagcgagagcaatgcaaaaacacgtccgctctctacggctgcacaattggtcatgtgaccacttaaaacttgaggaaaaaatgctcgacgctgattggctggttactttttgtgtagactcgtcctgtgggacaaaactaattttaaagctatcaaccaatcaaatcgttcgtgacgtcacagtttgttatttttcggcaggcgagcctttaaaagcggctgcacaagctcagttgttcagttggtcgggcggatttcaccaaaatttcaaggtgtttccgcgtcagtttttttaaaaaatttttcttgtgttaaaatgttcaagtatggatttgaaagtgttattcgtggtatgtgcagtacaagacagatgaagaatacctggggtgagtactatggcaaagtcgcgtcgctctcgaaatgcatatgttaggacttggtaaggtcataagactggcaacgcacattggcatagcgatgccaagtcttggttcggctagaacttgatccggggtttcgatcaattgagaatgtccagtgttcggcgtaaccacttagggtgaggagactcgctataccgacaacggaaagacggttgagctcctgtccccgcaatagtggcgaatatctttccagcctaagacagctggaattttctcttgattgaaatgacactcgagatgatatatacttactctcgaggtcgtctgagtgtctactgtttgagtcttgcatcatgttgatgctgctttccgatattgacggtagacatggtcacctgttgatcgttcagtgcttttgcagatcgccagaaaatgcgatagccaattaacgaaccacatttttttccttcagcttttttgcatgttaggagcaatgacaagttgtttgaaacgagagcgacgggacctttgcaaccttagtataagaatagtgttaagatgtttagatatgatagttatgtcttagatgttagttgttaagtcttaaagttgtgcacaacttattgtagctattgaatgtgtttctcttcacagggctttgtcacttttatcattggtggtggagtacggcaaggggcgttttcatatccttacttgtttagctaatttaagaaaacgacttttgggttgctcacactgctaaatgataacataagtgacatcaaaatttatgaactttggcaaacataagatcttacttgtaactgaaaaagatcaaagcttcaaattcaatgttgtatcaagtgtacagcttatttggcatttaacagctgcacataaaacgatgcaaccttttcctctcttctcttgctcttcataaaaaacaaaaatcaaaattactaatgctaatggaccgaacggcaaccgaaagttctcattcagattgactttgatagatcggcgcgggtaaactgtcaatgctggcttcggcccgactctgcacttggtaggcgatgaagccggtgcggggaattagtttgcccgtcatcgcgatgattgtttgcatttcatagcatgtcagtcccacgtttttaggaagagctacacttctctattgagatgctcgctatcacctactaacagccctttcgtccaagtgtagcgaaaggtgttcggggactagcatgccaatgtcttgcgaatataccgatctggtcaatttgaatgcgaatttggcttctacttcttcctctgtcttacttcttttaacacacactcgctgtttggcaaaacgatcagcgtgggtcaagcgttaatgctggcttcggcccgactctgtgctcggtaggcaatgacgctagtacggggaattacttggcccatcattgctgcgattgtctgtcagatataacatgtgcgtaccacgttctttggaagagctacacttctctatcgagatgctcgctatcacctttgaacagccctgtcgtccgagtgtaacgataggtgttcggggacaagcatgacaatgtctggcagagatactgatcgttcaaaattcgaaacactacttcttccctctgtttcttctatcatttggcactctatcccaaatttctgtaatgcagccatggtccagtataaacatcggtgaatctcaatgtaactacatttagtaagcaactaaattgaattctcagatggtggtacttggagacatgacggtggcaagcccgttaaatgcagagccacggaaatttggtactgtacatttacaggccgatgtctgattagcttatgattgaaaaacgaaatgtcaattcatactggagaattggacgcgatatttttacatgctgaagacacttgatgcctagtttagaccatctattttgctttgaaattgacacaaacttaaaaacaaagaaatcactgcttttttaggtgattagcaaactggcttgtttttcttaccacgacagaaatcgatataacacatacaaggcccataatttatgcaacgttttctccagtatgccttaacatttgtctataatacaactcaaggcatgatcatttctgtaatgaaagagttaaatcacaaggattcgtaacagcattctcgtacacttgtgcagaaaaacaggtgaatatgctaagatgctaaggctaaaatactagaaacacgcaaccaagaccaaaaaataatatttgtgataagtgtctcgtaaatggcataaaagctgccagctgcctgcattcagattaaacaacgactatgaatcgcaagagaagcctctcacctttaacgctttggaaagcggcacatgtgttcaagcaccaaaacctagagtgttggtttcaatttgcgaaggatggagaatcacacaacaaggtgtttgcatctgatttcgaacgaacaaggaagcgagcgaaactggaagacgaaaaaacattcatgacgactttcagtgttggaatacgtccaactcgaaatcagaaaagagtgctgaacgagatgttaagagtgagcaatcacgcttacaactggtgcaactatctcgtttgtgaaaaaaatctgaagcctaaagagtatgacttgcagaagtatgtgagtaagactaattccagtgacgttccaacagatttcagaatgaacaacaacgacgactggtatttcaataacaagatgacaaagatcagagacgcagcgtgtaaagatttctgtaccatgtacaagtcggcattaacgaaccaaaggaagaagaagaagtacatcaagaccgtgagtcttaaagacaaggacgatatgaatccaagtcatggagcgtttgagattcagaaggcgctaattcgtaaattgaaggagacggacagtgacgattatgatatcctaaacaactgtttatcggtcatggctgacaattttacgatgcgaaggaaggatgtaagaaatcgattcctgcgcttgtctaaaccagtgagcaaactgccacctttagaacatgccgttaagatcgtcaagacagcgaaaggaaagttcgtcttacatataccatgcgaaccaacttacacgaggagcaaacggtacgacgaaccatttgattctctgtgtggcatcgatcctggcggaagaacgttcttgacaatatacgatccatcaaagccacgggcatttcaaattgcatctcgatgtaaagcgccatctaagccagttcgtaaacggacaaagaaaaagggggaaaaatggcataggaaaaagaaaagtcagcgccgggtcgggagcaccatagacaagattgacagtctgcacgcaaaaaaagactatgttaattcaaaaatgcaagcagccatacggcgaaagcagccccaagcaaaaaaagatcggcaaagacaattacaaaaggtgtattatcaactaggtaatgttatcagatgggtacatcttcgttgtacatacaatctgatgcaatactcgtacgtagccattggaaagataggcatacctagtatcattcgaaggcaatgtaatggaaaacgaagacgtatcaacaaaaaatccgtacgtcatctgacagtgtggaatcattgcaagtttcgtgaaaggctcgtgtatcgggccaaaggcacaaagaccaatgttatcgttcaagatgaaagctatacgtccaaaacatgcagtgaatgtggaactataaacagcaaattaggaggcagtgaaacattcaagtgcacaaatccaagctgcgattacattacaaacagagacgtgaatggtgctaaaaacattcttaggaaatctctcggtatcggctcaattaaaacgtaccgtgcatgattttgaactttggaatgtttaatcggttgactcgccgaattccagctgaaccttatagggaaagcattggtgaataaaaaagggttagggtgttgcggcaaaataaaactgttgtagagattatggttattgtttacgtatgttaaatatcataaccagtaaaaaaaaccaaagcaaagcaatgtgttagcaatttattaccatcatgataagacaagaaggaatagcatctgtcaatactttagtctgttaatctcattttcacacacgattttactttggccatgcaaaagaagcactttcccttaggcttacgtgaacagtctttgcaaaaggtgtgtccgcaaggcactagtgtgtgatctttctcggctgacagacatattatgcataataacagttcgtcccttgcctcttgcttagctttagacagttctctctgatgagccaccagcatctcattttccctcttttcccacgccgtttctgacaatgtactgcttgtgctgcttgcacttgtaacagttgatgtaggccttgagtacggtttcagcctatgcagtcctttgatgccttttacgggacgttttgacttcaaagtacacgtaggtgttctcattaaagtcggactaattatatctggtagatcatcatcatcttcttcttcttcttcatcactatctatcgcgatgatatctgtcggaagcaactgtctctttactctgtcactgttgtctgaaacagcgaagaaagaaacgaatttcagttaaatcttatctaaaaatgttacacggttatttcaaaaagtcaaatcactattagcttaaacaaaaatatatctagttcaatttgaaagtgtcaactcaccaatttcatccatcagcaagccttggttctccaagagaaacctcgcagccgatatgatgtccggcatatctttgtcattcgttgcctctctgatctcgttttcccacaagttcagtttggatagcgccgacatgctactcttgaacaaggaaggatctcgtccgcgatccaagttgatgcaagtaacgacgttatcgatgttttcgatcaagttctgagctcttctaatgaggcctcttcgtttgtatacaacaaatgtttccattgcttgttgacggctcttcgtcatgaatgagctaagtaaatttgcagctgctctgttcatctttctgatacagaatgagagttaaaaccatccgcgcacgccatatctagctcaaaatgttttaaccaatcagaatgtcgcatttaaaccacgcctactttgtattaaccaatcagaaagcagattgattgaaaaagttattttttcggtacagtaccagggaaatagaccatcgagcttcattctatcgaaagcaatcatactgtcaacacgcttacaaactatcatacagctgataaattccagaagatgaaggtgaaagttttcagcatcgaaacactgagacagaggtctcaaactctcgacatgctgttaacgcacaacgatatatacaataagacagagaagatattgtcgctcggggaatgtcatgaacagtacctgcgagagcaacttgacggatttctgaaagaaggggacattgagcaatatcacaaacagttcgtagtggacttgtcgaatccagtggtgaactttgatattgttgtgtcaaggattgatactagaattctacttgttctactagactattatgctgtagacacatggaaagacgaattcgtaaactttgttcttagaagtgagagggcaaactggatcgtcttcaatgcacttttactcttatcatttgcagatcatggcattgttgatagatttagcacagaagtagatgaaaagcagaattacagaccgatgccaccatttcggtttaacgaaacgcctagacgaaatgcaaagtgtttcggggacatttatgcagcgattggcactcgtaaccgcaataaaagtacataaacttgaatatttgccttgttgtattttaacgaacaagtaatttgcccaatgctgtgcagtcagtaacaacacgccattcaactttcaaaaatactcaaagccctaaacctaacctcacctaacatttcctagccatacacctgggaacaatgtttactgtaatatgcatatcctcttcaaaaataagaaatataagccatatattgcattttttcgttactttgtggtcttccatttgcctttaaaagccaggctgttaggtttatacctcctcaaacatcttagataccattcgaaattatgcaacacagaaattatgcaacacagaaattaaatagactgacactgcgtgatccaaaaggaccagaagtcttcaaacttgtacagaaaaaaaacggaataatcttaaaataacttcacaacctcttaatgtacacaaatcaatactaaaatacataaaagaaatattgcaaacaaacatgtactgtaaaggtaaaatagctcagtactttcatgcgagtatatgtaaaaaaaaagatgattttcttttaaaggtttgactatatatatgagccgcgccatgtgaaaaccaacatagtgggtttgcgaccagcatggatccgcgcagtctggtcagaatccatgctgttcgctaacagtttctctaattgcaataggctttgaaaacgaacagcatggatcctgaccagactgcacggatgcgcagactggtctggatccatgctggtcgcaaacccactatgttggttgtctcgtggcgcggctcatattaagatacttcaacatatttttggttttatatattaagatgattgctaaaacaattataattacttcatgtgaaacagggtttttttttgtcaaactgaagtgctactgtataaccaataaaacacagcataaattatgagagatcagaaatagaaaaaaatgaacttgtaacacatcttgacttaacttacattctatttaagtttagtagttgaaaatgttcttcattttcacttaattaacagtcatttcaaagatggatatcaccagaatgaaagcttttcctaaataaagtatctttaaaatagaaaacttttgagaaactattgaaaagaaagttgttactattgctgctactatttcaataattattcatttagcagaattccatgccactcgtgatgaaaacattgcatcttgtgttcacatgtgaaagtgaaagatatttctatatctacaatgtatcacaacagtgaaacggaatttaaatatccaaagaatataagtcctctcttcaaagacattttttcaaactacagtgttaatgttaatccttcaatttttcacaacacctttatatatgtgattaaagatattaaacaattcatgataaataaaaaaaacaaaacataattgtacattctctttctttacccacgaaagtgcagttaaatgacaaatgcttctgtgaaatgccacataacgagtttttgacttcaaaagagaatgaaaaacattagctagtctcacctaccctgactgttttgcaaccaacactatcacttggtttggacgactcttttgaccatattataccaaaagtgccatttcttatggttgtcatttcttaccgtcatttaagtaataacctcgttgcttgtcatagtaacaagaaaacgctgcactttaactgcagagacgtgtgtttatatacaatgcaatgcagataattacggtgttccgtttggacaatcgtgacttttaattgaatcctaaaccgcgatgtacgatggtacgatgacgaaaacgcgatgctgcgatggcacgatgatgaaacaacgatggtacgatggggaaaacgcgatggcacgatgatgaaatcgcgatggtacgatggtgaaatgtcgatgtaatatcgcgttttcatcatcgtaccatcgcgttttcactatcgtacagtcgcattatcaccatcgtaccatcgcgttttcaccatcgtgccatcgcgttatcaccatcgtaccatcgcgttttcaccatcgtaccatcgcgttatcaccatcgtaccatcgcattatcaccatcgtaccatcgccttccggtggtcatgcgcagtggtacagtatatgtgtcagtaataaatctcattttcaaattgcactatgtaccttctacatcctaacaagaatatctattacatccagctttttatttactttcatgcatacataaatacaaaggacgtgaccttgaagattttacacagttttaatgagttgagcactgaacattctgaaaaacattttgcaaaacagcagaatctaaatggtaaatttcttctaacacaaaatacattgagatacattcatctattgttgacaaaaattcaagtgcacggaactacgcctttctaaccggaaggcgatggtacgatggtgaaaatgcgatggtacgatggtgaaaccgcgatggtacgatggtgataacacgatggcacgatggtgaaaacgcgatggtacgatggtgataacgcgatggcacgatggtgaaaacgcgatggtacgatggtgataacgcgatggcacgatggtgaaaacgcaatggtacgatgacgaaaacgcgatggcacgatggtacgatgatgaaaacgcgatggcacgatggtgcgatggtgaaaacgcgatgatacgatgatgaaaacgcgatattacatcgacatttcaccatcgtaccatcgcaccatcgcgatttcatcatcgtgccatcgcgttttcaccatcgtaccatccttgtttcatcatcatgccatcgcgccatcgggttttcatcatcgtatcatcgtgcatagcggcttagttttaaataaaaagtcacgattgtccaaacggaacaccatagataataaaaggcaaaaaagcgtaagtgctatgctatacatgtgcttgtatgattttatcatggacggttatttta

SEQ ID NO: 4911 - DNA, 11464 bp, Mercenaria mercenaria
  source 1..11464: mol_type = other DNA
gttttgcactttgtggtgtctgtaatctgccctggcgtactttgaattctaggaactagccctatttttcccctcaattcccatctctggcgtttttgtttggattgttagtggcaaaactggcaaccccgatatctctttcaagtaaagtgcttgaaaatcaattttctccttgcccatggtacgaccgaaaataacatcgaggcggaactgaggacgagaaaacggctttctttgggtttatataacatgcgccccgacggtaaaatggtttttcaagtacattcgcatctttcaagaacttttttttaatcgacctcccttacaaaacgaagtaattcggatcttgtgcgtctttatgaagtgttacaaggattttcttttcgttccccgaatcaggtcgttgatttacaaaccccaaagcgacacttctttttgtattccacgtacttctccgtatcacaaaacttgaaatagttttttttttttttcgtgctgaatcactcgggacctacaatgatggattttcgtttaacaacacactgatacctaccacagtggatttctatgtatatcacgcgatctcgcgttccaacacgtactttttttttctattgggtcccattatacgattgaagtttggcgtttttgaatccttaaatttagcaaggaggtaaccgtgtccacaaaaaagtgaggacgtccctttatcagcaatctgcccgtcattggtaatggtcccccccccactttcacactcaaaaacaaatcccgtaaaaactttaccactgcgtcccctactctttcccactccccactattttttttttgactcgaaccctttcccagtaataatgtcctggtgataatttaacatagggaaaaatggtctgctcgccttttgattacagagaaaaacagaaatgtccccaaggcgcctgtttttagcagggcaccatctcgtaatcgattcaggttaaaccgaatggacaaaagttaaacagtttgatcgttaccagcgctcctgtcctgtgccagcattgaaaaagcgaaaattgagttttcccttcgcgacgatttttttttccgcgtcgttcctacctgtcctctgtccactcatgcagatccaactcgtcacctcaatacggttcatccaaatcggtgctgtaacaatacgaaagggtccttcggttgtcccctgtcagattttgagaaaaattgtttttctgttttgcacttttatccacacatcgtgtccacaactttgcccttccaaacgcgcacggctcggcaaaacaaaagttgttttttccggacaaaattgagatattattctataccaactgtgtgtgctaacgattttcaaagctgtacgatctgagcaatatgtttatgtgattcctgattcgcgaatgatttcgtcggaccacctctcaggaaattgcccatgcgagagggtctaagattttttccgaataagtgtgcaatgaatgaatttaattttttgcaaagtttccaaaagcccttttttttttttccgaaaggtacctatgttggaattaatttttcttgaccgattcaatagacgttttagaccttttaactcagaatctaatctccgttttcaatgttttgttttattttgcttgtatgtaacacggtttttcgtccttgcccaatctcggaggatatgacatcaaataactttttcgtcgactctggttgtattcgtgtgcggactgcccgtctttttaaaaagtgaacttagcaatggtatctgccggcgaatgttagacgtaaaccactgcggtgagaccctccccctggaatagtgtttcaggtgtaagctcgtcctggctttctggcgtatctcgttcagcttcgataagaggacccagtacaggcaagctgaatccgttccttcattggcagtaacaagaaaatttacgttcccttggaagtagatgccatcgggtgacagtaaaggtttacgaaaacaagctttttcccttcgttccagtgggtggcgttccgagctatccgttatagattgaaagtccgaaaaaccgtccccccccctgcaaattcgcttgagttttactaaagagcctgaaacaaggttttaaccgatcggcggccctcctcactcaagaagaaaaatgtaatcaagaaacgtcctcctcttttagataccaaacagatactttttatggctttttcccacctcaaacctgtaacctatagcgcctttttaagacccattttgtttgtggaatatgtttgtctccgaatgagtaatccagattattcgctcaactgcgtccgaccgcgtgggccacttttgttgtccaaagaaatttagactaggaaacgaagaattggatctggatcccgacacgccgacctttccacacattccgcagtggtaacaatttttttttctgtccgttccgttccagaaataaaactcaaagggccagaagcaatccagtgattggcaaacggtcccccctcgacaatttttttttttttttttttgggcaattatccacgcattttcaagatttggccaaactcttcgtagttcctatcaagttgacagtcacccccgtcacctttcttatgttttgtatatttttgtcactacatttttcttatacaaaatccttcggtcatgtttttaacaaatgatccaggtccccggcaagtagataggggcaccaaagtcattactacatcacaataaactaaaataccgcgcgttttcagccaaacgccaatcgcttattattgtgacaaacgactaaaaattcagagaaagtgtcccctgttatttagcacccactaataggcccgcttactcttgacaatcacaaagacaaatccggaagtataaagaaatcaccccaaagttgaccaaatgtttccctgaatatttcgggcccgtaacaatacctctgtaataggcagcaagtgtgataatccatggtgggtgtgggttttggaccgaaaaacaagacaaggctttgtggtgaccagttttccaaggcatgtatttcttacatatattcaaaatcaattgtttttttttttacacgttctaagttgtttaattgaaaccagtttgtaaacgttggtcgtaaagaatattacacagtgcccccttcatcaagttttctttttcactttcagggttccccccccttttttaaatcggtttctttgctcatgtcccttgattcacagtccccctcttgcccttcttctcacacccatttttttttcacctgtttgtttgagtttttccacgctcaagttgttctgaattcctcgccattttaattgtcttttaaaattcctccttgctcgcccgtgcaaaacaaggaacaattccttcagtgcttgtcttcctgtcgcttcggaacttccatttcatccaatatatctattgtcacactctagccccacaaatagggtggttgttcttggtttttttttcatacatacaggtccctgcactcttctcccatatgctcgtgcaccatgaaaccggtttttcaccaacaaacaccaataatctacacgaaagcaacaagaacacaaaccgagaatccacccacacccgttgtgtttttcacggattgtaattctgcagcgcgaactacgaaaaaccacgtttcttgggccctatccaatgaaaaaccgaaagcaatatggaaaaatgaatgaaatacatttttttttggccatctccacaaagcatatcaaattgtccatccagaaataggtcattcgaatgactcataactaatcaaccatcgaaaactttttcgattttttttgtccaattgtttaaaaaattccactacatctcttctcgtcatattttttcttgtcgaccgttgacaaaacagaccacatcataattcccgccacaagggtctcatcatgaaatagaaccgcagtcgcacattttgtaagcgtgaatactctttttttgtcccctgagtttttttttgcggaatcagataatgtggccgcccaagctatcgaatagagccctgtaaagattcgttaccacagaagaggatacatcgttttttgaaaaaaaaaatccttcgagttgggcaaatttgtaacaaaatgtttattcctttccaacacattcttttttgggtccgaagaaagaatgcttcgagtacttgttcatgtgccgtttttggaaaatgcagaattggaatttcgacttcttgtgcgcaatcggaaattgataaaacaagacaagcatcaggtgaaatggccccagaatcgaacaaatgcttaaataatcttgttttatcttatttactcttttgtagaacatcgtaggcctttttccaacaaggaaaatctatttttgccaaaggtttaaacacagggattcaaatactttcacaagttttttaaatggcggactggtaaatgagtccctggaaaaaactgaaagtggaaaacaatgttttcgcccccgccagactggttttttgagtcccaatatttgtgacaagtatgaacatccatcaatgttttgctttgatgtttacatgatttattgaaattgacccttgtttatgtggaaattaaaagtttttttcatttacctgtaactacgttgtttgtatcttttttcaaactccaacttccacaaaacaaaacacacgaagaaaacgtgtttttacttggtccctgacaaaaacccatgtccccataccaaaattcaaaggtaagtaaaccaatggttcgacagcatgcacaaaatttatttttgttacacattcctttcgacccgcacgaaaccgacctttttttttctcgttttctgcccccgaaacacagcttaagtgaaaactttttttgaaatgaaaaacagtaattacagggcaaacatggttgtttttttcctatcggccgttatattcttggttgggcccagcaaatcagttttactcatcactttaaactgaagaggaaaacgagaaccgattgagcgttgtggaaagccgcattcgtcaatggaccgggaaacgtttccaagtcatgattgaacaaagcaccggaatgcttggaattggaaacgtgggtgaccgtcccttcgtctgcaatctccccgactccagtacttggatctaaatttaaaaagcaaggtgtgccaagaatggagaccaagtttgggatgtgtaacattttttctgtcggtaattccgacccctacgttcaaacagaagcgaacgttttgaaaatcagatgcccgccaaagtggagcaacccgctttaccatggagggcaaatttacctagtgaaaagagtaaagactttcaaaccttaaggcagtttttttttcgccttgccaagaaaggtttttttacctaaaacaaatttttcaacagaccgtttttttttccgggccgaagtacagcctgttctcagggatacgatgtcccccttttcgccaaaacaaggaatgtgtggtatcaagacaaccggccgggttgtaaaaaacttttgcaccattaacaagtctacgcagacaaagccagagaaaacgaaggtcccgagtgtcccctcataaacaaaaggacactggctaaatgtttacggtaggatcattcctaagtacaaacagtatgtgggaagatttgctaacggaaagagacatcccagaacgaaacgaaaatttccattcgaggaatagctgtgaatcagaccactgtttctcaagaatccaaaacgacggacgagaaagggttccctccgctttttttttcgtagaaaaaataatctaagattacggggggggggggtcgcccttgaagtcccgattatgaaagttatgtaaacgccgaaccggaaaaaaattcccgtacttgtcagattccttgttggcgatccgaaatacacggcgaaggaattacaaagtggcacacttctgactcggcaatatttttttttccatcgatccggaggcatgacatttgcgcccaacgtggtttttgtttacgatcctagcagaactggaaaccccgcttttttccagatcgggaccccggagacagaacaagaacaaggtccccattttacgaatttcatgacaagattcatttgtggttcacatccttccctgtccgtgtgctttcaaaaagaaaaagcagcacgcagctaatacaagaattagaaaatcggcaacctgaaaaaagccctggcaaccacaaaactgaaaacgtacgtcccgacgactgcaaactttttaactgtgggctcgtaaacctggtcaagattacaaacttgtccgttcttggcaaagaaatcggtttttttcctccatcgtgaggaaaaaagaacagaccgaccattctttgcccaaaagacgcctacccaggacttgcttctgtttggcgcaccaacagattcccgaacagagactgttacaacagagtccgttggcacggaattggtgcgaagcgaatttcgactccaagaacgagtgcgttttttttacacttccaagacctgtggtaaatttgcggtgtgggaaagaacagacaagactcggtttgccacaaagaaaactttgtttttattgtgaatgccaattacaaaaaacctccatgccgagacgttccaacggagcggagaaaaccattcctgtgccaaataccttgaacttttttttttcctcggcagtaatagacgaaagaactgaacaatccgagtttttttcggttcgattttctatcccaactttgaaacttcaaaggtcccaggagggctcgaatacatttttctgcacatgttttttttgccaaatgtccaagaatctgggccaagaattttgtcccggttcaatgagttaaacaaaacattggaaccttttttctgcttgggattctgtacctggaaatctgtcctaacagccccctaatgaacatcatttagattccttttttatgaaatttatgtttgttttctcaagcaatcataagggattaaggggggcggggaaaaaagaagaaaaagaatcgctgggagggggaataatatgtaaaaacacattgaaacgctaagagaagtggcaagagcatatgttttttccgtttggcatgatttgaagacaggcaggcgtggtgtgggtttttttatgggtttgtatgaccatgttggcaatcaaggaaaaagtaccagggttctttgttgttaagtgacctgtaaacttaaaaaaagaccgggattaaaacctttcgacacgtacatcacttgaataagtttgtctgcagagatgtctaagttggcggacgcgattgttgcctttgactttttgaacgacgacttcaatagaataatcattacagtacttgaaaaagttggaaaaattggccagatccgtataccccatgatgaattcctggaatcacgggaaaattttttaccaccattcgtcccatatgttttttcgcctaaatacgaaacctactgttgggagcaaggttgtgaaggctcaataagacagggtgcctttgtcccgctccgaaagatttactcccacaggagactccaaacagaatagtggggtttccaaaataattataataaattggattaagaaacttgcctcacatgttttgacccttttttcgatgcttcaaagaaaatcattgtttgtagaaatcccttccaaggttgtttgagttttctgattacgaaattgtggtttattcgaacttgaaaaccgtaggcagtacgggtttctggctaactgttttttttgtcttcgtcctagattaatatcaacccgtaaagtttattcccggttacaacttggttttttttgcagtaatctgttctccctcttgaagtcacgtttatagttttttacatcttggcttttttttcgtgaaggaagataccttaagccgttttccgttgagtaaaactttaagagacatccaacagaattgttgtgcgaacggaaattgtcccccctcgtaaaaggtttcttttcagctagttccaccaaatccctgttggcaaatcacatttttggtgaatttttgtgagaaccccacctatctacaaccgcaaaaaccggaatgaatctcaaggaaagtcggttcaggttatactaatacaagccttctgaattctaatgcattttttcctttggggcaagaattagcgaaactttttttttttggcgtggttttttcgaatgttttatcagtaatgttccgtaattttttcctaaaccttgaggaatcagttttttgtttcctcgttatttccttttcacgagcacgtacaacggccctgtggaggatccggttcctatcaatttttcttaatacagaggtttttcctgggcattgtcctgcgttaaaaagtatcatcattgcgtttgacacgttgacttccttcgaccgtttcaacagatagaaaccaaatacgttctgagtcttgaagaagacttacaaacaagcttgtaatagtcctaacaaatgagtcaattcgtccttacataacacgtttttttttacatcctcccaagtgaatacatgttgtttttttttgtgtacagttttttgcgaaactgcccatgttttttttgcccagcaagtaccaaaaaaacttacaaatgcaaaacaaagactacatttttttcatgaatttggcgggttttgtctttttttaatactttccttttttccccacagaaaaattagtagtttagaaacctgttcgaaacaactcgttcagcaaaatgttcggtttctcgtgttttgaatgttttccccatgccgggccttcgaatcaagctgtccgtctgcccgaccctgggttttggtcccttgttttgttttgcatcttgatttttttctcaaagatttaacccatcttgaatagttttttttttttgtcccctgtccctgggttccgtagatacggaggattgtttgttgaaggtacggaattgaaaccccgttttttgtttggcattacagccttgagtcaatgggtgtttttggtgcgtcccatcctgtggtttccaaatttgaccgctggctggaagcgacgttgtttttgtgtcgcatgtttgttggttattttgacccgttcctctgaaaattttactgccagctgccaacgcccttggcccttgactccctgtttgaacgtaaggagtgttgatattaggaacagtcggttgctgtattccatctctcgtggtctgaacataaggttgtatctgcgaactcacttgactgttgggttgctgtacagacataggataagcgttcggaacaaactgttgttgctgatgctgcggttgttgcaaatagcgattgttcagtaagtctttgaacatctgcgggacctgagtctgaaaaccagtaattcccgttttggcccactccttaaatttggccttccttgaagtcgtttcatttcctgtccccctcaagttttttttttgcgactggtgtttgacctctccggatttttttaatcccaacgtctgagcgcattaagtaataggtttttcgtcgttccaccttcctcgtttttcttttttggcgtaatcagtaggtaaactgtttaaagtttcaagacgacgccggtttttgggtaaaaaaaacctttgtgttttttttcgcgaaaaaaatcccccgaagcggtggtaccgaggacgtgcagagcatcgtccatgctgaagttgctctgctcttgtgtcatgcctgtacaagaatcgttaacgtcagactcattcgaccgaaatgccttaatactttttttctcgcattcatgctcagcgtagatgaagtcggtgttcgtttctccacacagtaaggcatctttgaacagcaactcgtttctgtcccgaccgtgtttcaatgcgtttcgactgtaacagattcaacactttataaaagtcattttgattgttcgtgtatctctttgtggatcaagtccccttttgttcgaatacgactttgaaaaaaaaaggggaaaaaaaaagaagtgccctatctatcctaacgtgctccctaacatcacccaaagcacgtgtttttttgaatcaagaagagtgttccttgtcatggaaaccaagctgaaacaagaccaccaaacaccagccctttttcaagtacagggaaccgtggacggtttcccggcccttggtaaagttgaatctgaacaagtcccccccttcgtttcatcttttcatacctgcacttctaagaacgcggaattatcgatgacgccaatgcaatacaagcctttattgtccactaaaagatcagtaacgtaacctacggtcaaatcaactcgaaagtcaacatgagacacaacaataggtatagtgattccggcattcttgtcgacaatctgtcctggcaatagattttcgtgatcacgtacttctgattggattcacgcacatcgaagaacgcgagatatcctcttacttcgaaatggcgccgcgattacattttttaaaagtattccgctgtaaaattcttgtttcttttccaacttcctcaactcctatattgtttgtattacgcctttttttggttaggttaacaaaccttttgacctctcaacgtcaaagtatttcgcactaaacgttttcctgcggcgggatattgaaatacgttaaaacactaaacagtttcaatgtcctttccgttcgcgaattttttgtttgtccatagaaagaaacccaagaacattggacccaacaaccttttcccccctctaggttgacaaaagttcccagaagtttcaacaatatcattttttttttctttagtttaggcaaaacccctctaagtggtgctactttctccttctcaccgctaaatcgtgaaccacatatctcgccaaagcgtactctggtgcaaaagtgtgccccccccagccaaggtctgcatccaaatgcagggagtctccgtgaaataccccaaaatttccaacttttaggaagacctttaggtgatcccttagctacgttattgtgtacagcacttctgggtttttcgaccgtcctaagcaggcccaaaaattgtttagttttctttgttaatgccatttgagggagccaactagaaattataagtctccggtattgttcagataaaacacagatcattccgaatacaaccccccggctaagtttttaaattccatccgtacgacagttttttgtccccctttggaaacttctgcaaatcctttacttttgaacgtaatccgtacatcttttgggaagaacgcgcttgtgaatatggaaaatcgtgtggggtcgaacacatataagttctgttgtggattgggcgagccgaacccgggtataatgcctgcggcagacatttcccttgcctgcgaagcataagttttgtggtttttgaacgatcgggctcgaccagaa

SEQ ID NO: 4912 - DNA, 15947 bp, Mercenaria mercenaria
  variation 11548..11647: note = n is a, c, g, or t
  source 1..15947: mol_type = other DNA
tccacttttgttagcagaatactaagcatatagtcaaaagtcactatgatttcgctctttagtaattagtgacaacatgccttatgaaaaaccaattgcaattatgagttaatgctggacatttgtatgctttaaccaaaggactcgtgtgtacaatatcgctgttttgtcaatagcaaaagacgagcatttcatacgaataccttcaaaaatgatcattgcttttgccttaccagtaattcaagtctattatgaaatggttggtcttaattaggcatctatgctctttggcatgtaaaaatatcgtgtccaaattacaagcaagaattaacatttcgtttttcaacaataagctaatcagacatcggcctgaggtatgagccgacgtattcgttcagaattgcaatatcacatttataaaaatgtacagtaccaaatttctttcgactctgcatttatccagacttgtcactggcttgtctcgtgaccaaactgtcatctgagaatccaaagtggtatgcatagaatctctagatcacagggcctcgaaacaaggtagcattaaaagaaatttgggatagagtgccaaagtagtgtttcgaattttgaacgatcagtatctctgccagacattgtcatgcttgtccccgaacacttaccgcaacgcttggacggtaaggctattctaaggtgatatcgggcgtctcgatagagaagcgtcgcccatcccaaagaacgtggtacgcacatgttatatctggcagacaatcgtagcaatgacgggcaaactaattccccgcaccggcttcattgcctaccaaatgcagagtcgggccgaaaccagcattgacagtttacccgcgccgatctatggaagtcaatctgaatgagaactttcggttgccgttcggtccatagtaattagccttagtaattttgatttcgattgtttgaaatgagaaagagatttgtgtttgccaaagattcgaaatttcgacaggacatacaccagagtcgggctttcaagttttttgtactaggatgacgttgcaagcttgtcataagtaggcaccctttggcatacagagctggtgtgtatacccgatctagcaatcttagcggacataataagaccagatcctgtcactagacggagtcactcctacttttccaagcttgtaacgcctcgtgatgaccaaaagcggttccttatgctactgcacatcaccctaccatagcataaagctggtctaacgacacctccatacttttggctgtcccgtttttgcctaaacttagcccgaccctagcgatatcggttgccgttcggtccattagcattagtaattttgagtttttgttttgaaagagaacaagagagtattagagtaagagaagagagaaaaaggttgcatcgcattgtgtacagctgttacgtgtcaaataagctgtacactagatgcaacattgaattttttccaattacaagcataagcttatgtttgccaaagttctgaaattttgatgtcacttatgttatcatttagcagtgtgagcaagccaagagtcgttttcttaaattaagctaaacaagtaaggatatgaaaaacgccccttgccgtactccaccactaatgataaaagtgaccaagtcctgtgcagagaggaaaaaaacatttagtaacaataagttgtgcacaactttaggacttaacaactaacatctaagacataactatcatatctaaacatcataacattattcttatactaaggttgcaaacgtcccgtcgctctcgtttcaaacaacttgtcattgctcctaacatgcaaaaaagctgaaggaaaaaaatgtggttcgttaattggctatcgcattttctggcgatctgcaaaagcactgaacgatcaacaggtgaccatgtctaccgtcaatatcggaaagcagcatcaacatgatgcaaggctcaaacagtagacactcagacgacctcgagagtaagtatatcatctcgagtgtcatttcaatcaactgagaattccagctgtgttaagctggaaagatattggtcgggatgacggggacaggagctcaaccgtctttccattttcggtatatcgagtctcctcgccctaacccaactacgccgaacactggacattctcaattgatcgaaaccccggatcaagttctagccgaaccaagacttggcatcgctacgccaacgtgcgttgccagtcttttgtgtcctaatcgaaatcctaatgtgtacaatacgagagcgacgcgactttgccaaagtactcaccccaggcattcttcatctgtcttgtactcttattaccacgaataacacttttaatccaaacttgaacattttaacactagaaaaatcttaaacatactgacgcggaaacaccttgaaattttggtgaaatccgcccgcctaactgaacaactgagcttgtgcagccgcttataaaggctctgcctgccgaaaaataacaaactgtgacgtcacgaacgttttgattagccgatagctttcaacgtggtttcgtccaacgggacgagtctacactgaaagtaactgaccaatcagcgtcgagcattttttcctcaagttgcaagtggtcacatgaccaattgtacagccgtcgagagcggacgtgtttttgcatcgctctcggcttggtgtgtgtgacaacgtggtttccatattgtttgatctggcagacacaaacatagtcctaggtcccaaaagtatgttcacaatagttgaaatgtccaatgcaaactttttcctttaatacttaaaaaaacacgagtatggaccactttgtcatgatggttgaaatgcccaaatgccaacttctccttaaatacttaaaaacacgtgtatgtaccatcggaggagtataatgtttgaccaaacatgaaatcctacatataatataaaactatcaaggtggactgttttggaaaatgtgtcccgtacatacaagggcacaatgctttggcatttcgtatacatcatcataatgtaataggagaagtttctcctgccttggacaaagtcgtatagtgtcactgatgctgtttgaccgaacatgaaatcctacatataatacaaaactatcaaggtggactgttttggaaaatttgtcccttatatacaaaacacataatgctttgacatttcttaggtatcatcgttttgaattaggagaagtttctccctacattggacactgatgttcaacaacgtgttatgcattagtaatttaggagaaaattccaacatcatgttgttttgtttccctactgatcgaaatttggaaaaagttagcaacaggatagtgagaaaatggtaactatcctgtgacgcatcgggacaaaattccaacatgtagtacagtatgatttcaatgccagatcaaacttagaatcacaaggatcggtatcatggatagacattcgatgcccttccccatacatctaactgcggcgtccggacagttaggcaaccaaagagtgtattcgcacatctcattagagggaacatcgtgcttccctttggcggagcaaaggcatctaatccctatccatgaattctcgcagcgtcgggttaagcaattccctatactggcttcgctgcctcgccaaatatagagtcgggcgattacaaccaacattgacacttaacccatgccgatcagaaatccaaacaagggactaggaaaaaatgctcaacaccatgtaaggactgggatagaatactattgcatcgaaaagcatttcaaatctctgagtaacgttcgctatcatatagccttatggtcatgttttggcattctgatagtttgatacgagtcttattatgattttgtattacagcttactcgaaaggttgacaaatggttttcaaaaagatgtaactctgtcattctcaagtatgtaagagttatcgctttattcgcaatgagacgatgcatgatgctatactttttcatcatactacagtatcagaggtttgactgcagttcgatgcaatggcatgtactgttggatatgagaaagactcgttggcaaaaataaaatgagacgttcaggaaaaaaatgatcagtcagcaatcaattttgttttactctgccttatctaatatctcaaaagtaagactctattaaaagtttttcagcttgactgtatttttcctaacgtgtcacgttgtatttgccaacgatccttacttgatgtatcatatttctccgagatgtgatagaccgcacttgtctaccaagtactatcaatatttcattaagacagcgtacttggcaaacgagtcggtatagtataatttcggacagacgggacaagccatatgacttatgatacagacgaatcagcacaaatcatcatctcaggagattgacattacttttttatactgacagataacaaacacaacaagcaatagtgtgcctcttttacgggcatagccacttgtacgggcaaattgtatcatacaaaacaataaatgtaaatatgaaatacatcagagtctatctctttgcttcttcgaaaataaaaagcacacatcactgttctgtcatcaaaaatgcagacaacattgtgagctctagcatcttgtcggtttgacagcctgaaacagaaatgaatatctttaacagactgaaatacattttgaaagtaccaaatcttagataatttatcacaaaaaatgcaagctataactggtgttatacttgttgaaatttattttagctgtgcataatgttgaatgtgaatacctgattgtcttttcataattgtgcctttggaagttttgtcacacaccactgctgtaacatctttggcagatcaccacttcacaacaatgctctgaaaataaaatgaaatacaacatcagtcaatcaatgttcatattttctatgcgaaataacactgaaatgctttgagaagtttcttcactcttacaaaatctatgacaaaaatgttcatgtatcaagcatcaagctgaatggcattatacttgctgagtatttgtgaaatgcataccttatttttttgctgtggaaaatctgtcacacaaaacttcaatatggttgattggttgtaaaacttgagacatcttggcctgtacaaatcacatcacagtgctgaaaaaataaagcaaagcattagaaaatcagagcttcttgataactcattttgcaaaagtgcttatgtatttttacacacaatgagtaagacaaaattaagtccagaaatatttccattatgtatacctaaacatctcaggttagttcacatatctacaaacggtgatgactgtaacatgcattcaatgacactaaaatgctgaaataaaacatattcgaccagtcaaaatgcttatttatccttctgaaccacaaaacattgaacataggctccagagattccaccttgtggcatgccataacgtatttcagacgctatcaatttacccggcttcggctggcagccatttttaatttcaatacaactcgaagagaaaaccgacctacctttgcatgcagatttcgtctcctgtaattgccatcccagtccatccttggtagttttcgacggcagacattctgagacgtaatttgtcataaagatttttcagctccctccatctgcaagcacaagaaaatgattttattccacagaaatacgttcgcgcgcaaagccattactcccgctccttgctgaacctagtttgacctcacgtttgaccccacgtgacccaggtcaccgcccagatttcggaaaatacggtctaattttagacttgggtttccagaaaaagttcggagatggtgaacgacagggcaatttgaaatcgatgttttgaagtcaattctgatcgcagaaagccgaaaatggtctcattgtaaagcggagacatttgtctttgtggtatcaaattgtcagttgcgtatcttgtttactttttgcagaattatcgcccaaacatgtacctttgttgtcacggagcggccattttgttgtttaccgtggtgtgtcatttctgagctagaaattaagtctttccctaagattgtaaattatgacacaattatcataaaacaagaaagggtttacctatagaatgagaccaagaacacgaatttacatcgaagattgaataagatattcaagtctgaaaatcactcattttcgtgcctattttgacgaattccgtcacttttttcagagttaaaaatctactacatcgaaatgttttggaacaaaatctttgcatgcatttattaggctgggtaactggctttctgattctaaagcagatattttttctgttcgtgcattagaaaactacgacggttgaaagttgcaacttcgcaaatggcgcatcattgttatgccggtattacggtctgtcacttctgagctaaaaatcatctatttccagatttgtgtaaattttgacaaattaacatcgaaacaagaaagggtttagctgtcgaatgagaccaacaacatgaattttcattgagaagtgaataagatatttacgtttcaaaatcactcattttcgcgagcatttcgcatgaattagaacaatttttcatggtaaaaaatacatataaccaagtgtttcagaacaagatttttacatgcattcattacgctagcgaacaggctttcttgtcctaaaagagatattttttacatacacgcgtttgcaaaatagaagctctcaaagtttgacaaaaattgcatcattctgctcatatgacgttgcacaaaaaagtcaaaataaagtttttcttcctactacaaacttatcaaagcaagaatatgtcattcgctgacataaaatccaccaaccttttcattttgttacttccaaatcgtccaaattattccataaagctccaaaactcagaaagaaatatgcactctcattttgttcgatgcagttgtgactgtgacgcactgtttgtatatgcacgcggtaaaatgattttgaccgtcatagttatttcgcagacttctctgttttactgttttttatggtgctaaaggtcttgtatacattttatcaacgaagacttttgtattttacagaatgtttgaaccggtgctgtttagctataagctgttttgcatcataaatgcgcccaacgcttttcttttatcataattacaagaaacgggcattccttgtgtgtttgattattacccaatggcgacgtaaacgtcaataaatggaaaatcattgccgatgcctcgttgtgcgtcgaaacgtctaagtactcagtgtatgttttatgtttaacgtcgttttttgacaacagtatttaggtgttatatgacagaaatctactgatagagtaattcgagcaaacattcactttgttttttggtttctttattcagaaataaataagtcgacatataggctacaaaggtacatcataactaacaccaatagaaataattaataataattcactgcactgttaccgaacactccaaggcggtgcccaataagtcaatttatacaaatcgttcgttgcagctatagttaacgaagacccgaactgcttcctgtacagtttaatgtgacaactaccctaacggcagggtcagttggttgatctggcgtcggctttaccgttatatccctatttatagtcactcaagtttcttttcctaatccagtttctttgttttctatctccagtttcggacaacgtgatggtccaataacaatgttaacacgttcacatagaccttgtctgctccatccatcattttgggttccgtcgtgattttacaagtacaatccgaatttgggtccaaactgtgttcgcaccactccaagtcaatcccagaatgataattactcatgtatttccttaacatgtacatccaggtagataacctcatatccaagtctgtccttatttttgctatgtcctcgtacttcacgtacagacacttctttgcagtcagaaaatcacgtaaggcacactccacatcaatcaaatattcactgtctggtatgtttgaaaagtctagggtcaaacttgtcctgttcttgatgtaagctgtgaataattccatccaagtttctaccgaaattccaagatgtagtctactaatatttgcttcgttaatcgacaccttgtgatgtgtcggacacgcctcgctcagtacagtactaaaggaattcgacattgtgttgaataccgccgagctattttccatcttgtttatctatggtaagatgccatcctttcacacatttttatagtgcaaaaatgttataaaattataaatttgctctcaaaacatcgccctgcggcatgccattttttccctttcaacacagtggggcaccgccttgcaaaaaagtttcatcgtagcaacaaaatttatgttcactaatccagcttttgacacatgcttcattgtcatttcttgtggcaggactctgtctctgactctgatgcatcatagttcaaacaacaacagtagtcgacagacacatagcacagcttcatgatggttaccaactgcatgtctgcagcaacaaatatgcaccaaaaatgaaccttcacctccataaaacacccccgatttaaaggggggggggtctttttccagtcattttttcttcttttcccgcacaaaaatcactctaaaacaccccaccttctaccacaaacatcctttgcaatccaactttttttcaaatcccattttggtttgctcaaacgtgaacttttttgccttttagtccctacgatccatgaacagtttgataatattaggcaagtttttgagtaaccaatatgtttcacggctgatgacaaatcctctacgttcatgtttacaagaagtgtccaacacaaaaagcctatgacgtgtccattgactcactagtttgatctgaatgtgttcgaatattcggaataattccttgatatattcatacacgtttacttttttggcataaacacatacatctgtgcgatgtctgcgcgctagtgtttgacaaaagttttcagttgtaccagaatcaggcatgatttgaagctactctgaaccttataggggaagcttccttatatacaggtttttgtacgaaaaataactttggagtaaatgcacctccctgctgtatcccattttcaagaatttatgttgcgtttatcacattcgacccgcatgacgccttttctcgtttctgtcggaacaagcattagtgaaacttttgatgaaaaaaaagtattaaagggaaatcgtgttttcctattcagtataaaacttgttacatttcggtttactcctcacttcaaaatgaagagaaaacgagaacagatgactttgtggaaagctgcgtttgtcaacgggcaggaaacgttcaagtcctggattgacaaggtgcgaatgcttgaattgaactgtgacgtctcttctgcaagctcgacacattactctgatctgaacgtgaaaacaaaatgtgctaagatggaagacaaatttatgtgtacttattctgtcggcattcgacctacgtcaaagcagaagcgaacgttgaatcagatgctcaaagtgagcaactacgcttataactggtgcaattacctagtgaaggagaaagacttcaaacctaagcagttcgacttacaaagagtggttacaaaaacaaattcaacagacgttccggccgagtacagacttccaggagacgactggtttttcgacaacaagatgtcctctatcaagttgaccgcctgtaagaacttttgcaccatgtacaagtctactcaaaccaaccaaaagaaatcaaaggtcgatctcagaaacaaagacattgctcagttacgcgaaggatcgttcgaagttcaaagcaagtacgtcagactgctttctgaaagagacataccggaggaacgaattcggcaatcgagaatagctttgatgtcagacaatttttcgaaatctaagaaggacaggaaagaaaggtttctcaggctttcgaaaaatgtatctaagataccacctctgagtcacgacatgaaggtatgcaaacgtccgaatgggaaattcatactgcagattccttgcgatccaatatgtacgcgacagatacaagtgcacacctcggactcgatatgttctatcgatccgggaggtaggacgttcgcgacgtgttacgaccctagcaacttgaccgcgtttcagatcggaccggagacagacaagaaaaaggtcatttacgaatttcacgacaagatcaattgcggttcaccatctcctgtcgtgtgctcaaaggaaaaagcagacgcaagccgtgcaagacagaatcggacaactgaagaagctgcacctcaaattgaaaacgtacgtcgacgacgtgcacttgaaactgtgctcgtacctggtcaagaattacaaactggtcgttcttggcaggatatcggtttcatccatcgtgagaaaagacagaccgaaccatcttgccaaaagagctaacagagatttgctgtgttggcagcactacagattcagacagagactgttacacagagttcgtggcacggactgcgaagcgatcacacaagacgaacgttacacatcaaagacctgtggtaattgcggtgtgaagaacaacaaacttggtggaaaggaatcgttttactgcgaaagttgcaattacaaaactcaccgagacattaacggagcgagaaacattctgtgcaaatacttaggactttttccattcgcagcataacgaaagaaaatgacaatcgattattcgggttcgattctatcccacttgactcgaagagtcagaggactcgaagacatttttgtcacagattttgcaaatgcaagatctggggcaagaatgtcttcgggtcaaatgagtcatgaagttattttaggtctgtgtctttgcgtaggcagaatttcaaatatggtctctcgtgtagctcatccttctcgtttttgaaaaagtgtttattgactagtgcattagccgtttcgcaatcaggttgttgaaatattttaccaacggtgacatctatgatatgacaaccggctggttctatgcgacttgtgtatgttggaacgtgcatgaagtgatcttgccttgttaaattaactttgacaggatcgaatttgatgacgaatatacctctgtaaaaaggagttgttgtctcatatgagaataaagacattaggtaatccgatagaaaattgaatgtgttgcggtctgtaacttcaatgatatcacattcctttgtttttgtttcctgtgtaaaactaactattctaggcatactgtttggcttaaagtaaggttcataaatctcattttcacgacgcaagaagtcatcagtatacaatataggttctaggtatcggaacacctggttatatctgtcgtacagaatgttccgtgtagatctataaaccgcattttgtaataaattcattgatgatggtaagtctcnnnnnnnnnnnnnnnnnnnnnnnnnnnnnnnnnnnnnnnnnnnnnnnnnnnnnnnnnnnnnnnnnnnnnnnnnnnnnnnnnnnnnnnnnnnnnnnnnnnngtcgcctccacattttgcatggcaaggcttttcctagatttcacttttatatataaaacagaactagttattttatacatgacaatttcaaggatgatgaaaggcattttaaagtttaaaaaaatcttgaatatttctgattttatcgtgataagtaagaattttgcaaacgaaaagtacatttcggccataaatcataaaacgtaagcttaactaccagaactatgatttaactttatgtaccttaacactttaattgaaaaaaatatcatgtaagaaataagcataagtgtgctttatgccaatgatgtgcaaacacacgtacattggctcaaaggtaataaaattgtttcaaagaagcaattatatctggcaacgagattcatttaataccggtaggaatacagcattcacataattgctatcttgccgctcgtctaacgttagttgtggcatgtactcatcaactaaaatatacacgattttggttgcttatctttatatgtgtttatatttgttagaaggttactaacataatgtagatcaataataaaagaacagttacataaagagaggactgttacgaatatcttaatattatcgaaaaaaatgcttaattttgctttaacaacgcaaccgctacaaactgtacaaaatcagaattttattgaaagtgggacatgaaaattattaaattaatattatttaatatgtacaaacacataaaacaaattaaatttgtgtaagactctttttccagtccttaaaacatttttgaaacattttcataataaaagcttgacgtgaaaacatcacaatactatgcaatcaaggaattattgaaagtacaaactgttaacgtgttaacagtttttcttcatctaaaggaaaattattctacaattatattaattacactatttttaatagaaataataacagtatcaatattagtttagttaggggagatttgcatttgccatgcaatgcagcagtatcaaataatctatgtaagaagttatgagtatgaaatttctaacagttgacttaaattcagaacacaactctgctggtttgcgtgcagaggccgccaaagtgccaaggttttttcaaatagttgtattagcttcgtaataatttcattgcgtaaatttatttgacactatttcaacttaggttttcattactattagaataataagtagatacgacaaggaaattatttttcacacgtcttaaatgttgagttctgctcatcccggggctagagggcgtggaaggtagcatgcatttccactaccgtccatgaacaggctcaatcaaaccgagcctgaaacattttcgtttttgtcgtgttgagtgacctgtgagctttccacttttttctattttaaactttaacctgcatgaaagtattttgttccgatacgtaacataaagaaaaagtgactaactaggcagaatgtccaagtatctgtttttctgcctattccttacaacatttgctgacacgtactgactttcctccgaaactggtgacattgttctcaaaatctgcgaatattaaatattacactaaatgtatgtaatgtaaatacgtgcgtattacagacgtttgattaactaacgaaatcaaatattgaaataatatgctgtgtttcgcttgagactatgaatttaatatgcattaccggtttatagaccatcaaaaaattactgaccgaaatttatgtttcatcaattattcaagacacgttatgtccaatacatttttgaaaaaaaggagaatttcacggagatacttgacatttgagaccatcttcacaatcaaaaagttatcaaaactaaaatcaatatcgattttcattgttacagaatgcaaattagtctatcaaatgatttcctggtaccgcaaattcaagatctattttcggtcgttggcttttttcgtctatttctagtagatctttgtaagttgtagggaacctagaagctggcaaagctgatgttggcagcatcagtgtttccactagtgcatggtgaacaaatatgtattgttcctgaaaatggagatactcatgacgatactgacggctgtatcataaagttgccaggttacggtacatacacatgtaatgttcagttattaaagtgaataacaattcatatgaaatgaagaaaatttgtatcgctaaatgattaattcctcttctattttcaataactgtttctggaaaatatcctctagatatactcaaaatgtaagcgcctttgttgctctttgtacaccagtatgtatgcatttttcaagggactattttgttgattagaatatattatttactggcacatgtctgtcgagatgatcgacttaaacggtgtagcataagattgaacatgacttttaggggttttgagctagatatgtgccttccatataagacatatatatattgcagtgttagactctgtgtgtacaagtgtcttctagcccgccagcttagctcaatagggagagcttagatctatggctcgcggggtctctagagcaatccgcgggcgggctgtttgtcctcattgacgatttgataaaatacatcgtgtttgaaatcattcgtcctccacctttgattcatttggggtagtaagcagttacgtgcggagaacaggtttgtacaggttcagaatccaggaaaactggttaggttaactgcccaccgttacgtcactgacatactgttgaaaaatggcgttaaaccaaaaaaaaaaaaaaaaaaacaagtgtcttctccttaggtttttcattcgactccaaccccctttacaattattatccatttaccaatgtttggaccatgttcactctttgttctctcagtgcctggactgtcccagttacatctatatagttcaaagccattgcttggtctgttaagtaatctaaagcgataaatgtacctgttcttcctataccagcactgccaaaacaaaacgtaaaataaatggaaacgtataacttcaatacataaattgaaaaagtaacgcaaatgctgaaataccaaatgttttaaatatctggcaggtcaatcagtctagaatatataaatgtatacaaagtcaatttagtttaacactatcatgactggattgattaccgcatatactaaggagaaattagttttagctccatgtactgacctgcaatggacaacagtcggacctgtttcaacacaaggtgcgtacttaactttattgcgaaatttgacaggagaagatgcatattttggaacacctttgtcaggccatgctgtgaaatgaaactgtgtaactcttttctctgcactatcgtcctgttttgaaggaaaataaaacatatcattaaaagaacacattttttttggttttgtatcatcaaaccgaaagaacgataggtaacaaatttacagtcaatttttgaaaatttgatttgtgttcggagaacaatgatcaaactccggtacaatatagacatcatggacaaacctttttcattgaaagatcccgaattacaaattccgaaaataattctgatttcttcattgatacttttatatctccgtatgtcttgctcccagatcctggccagtactgttcacactttttctgaaataggatatttaaaatggattggttgttttcttttcaaaagcatagcgccattggaattcttcagcaggtatgtattcaaaagctatatagggtatattatataagtatagtttcagtatttcatttactgagcgagttgaataaaatgaaatgaatcgaagctatagggataaccatatcgttttacttaacaaaatcaatacctttttgaattttctattccatttatcattagaaaaaaatatcatccaatactgactccacagctataaaaagtaagacataagaataattaggcaacttaatcctttggttgataaaaatactcttgattccagacttctttaatattgaattctgtgttgaaacaattattattttacagtttgtagtctaatgtcatagagtgtacaagcgcatcactgagaaaataaataaaaaataacccaagacgcctaattgaacatgaacagtacatgcaaatgtcaataacattgtaccacatgttttacgtcgtggaatgaaataaagccattacataacacttgtattacagtagtgtagtaaaggtttgacgttggcgtcgttttaagtatttgatacgttggtcaaatggaattagtcaataacaggtaagaaagaaaaatattta

SEQ ID NO: 4913 - DNA, 11442 bp, Mercenaria mercenaria
  source 1..11442: mol_type = other DNA
aggatcgaatttgatgacgaatatgcctctgtcgaaaggagttgttgtctcggatgagaataaagacataaggtaatccgatagaaaattaaatgtgttgcggtctgtaacttcaatgatatcgcattcctttgtttttgatttttttgtcacactaactattctaggtatactgtttggcacgaagtaaggttcataaatctcattttcacgacgcaagaagtcatcagtatacaatataggttctaggtatcggaacatctggttatatctgtcgtacagaatgttccgtgtagatctataaaccgcattttgtaataaattcaaatcgaatgatggtagtctcatcaaatcttgtatgtagctcgtcctttcatcaatccttaagtcaatgagagtgcgaccaaatttgttgtaaaaacgtcttgtcaatatattaagtatgtccagccatttccagtcgtatggtttaagctcggaaaagcgtttcatggtcacctttggatatctcatcttgatatatcgatcactgttcatagttcctcgttcaataaagtagcaacgaccgtccgcaattactccaacagtttgcaacatattgcattgacgacaaacacaaactgatgtgttagcaatagcccgtttatttacataagacaaaattaagactgtcataatggctttgacatgcatgattataactcatctaacattttctgatcgcgaagtcgtcatacgtaaatagttatttttcaacttcatttaacaaagctcagcttcagctgttttgcttgtttttctttactagaacacgttgacgttgttttcactttctttttcctcgaggcctgttcattgcttacatccatgatcactcctcccaacagcgtagtttgtttcactttctttggctttagttgtgaccgaaactgttgtgtttcatcttccagtttccgtttagtcgtttgcgaataagtcgaatcacgctgctctgagaagtagccatgaagggtattgttccacaattgtttcgcttgtttactcttttgcttctgtttctgttcgtttacttgtcgcatcacggcctctggcgatatgaacaactcgaattcacaagcttgtgcattgggagcaacacgtagacttagcaaatctttgtagtggctgtaggttgtttctggatgtataacagacatcactttcagtacctcggacaaagtttgtttcacaacagcacgggtgtcgagatgtagtggtttgttttctctctgcaagtttgataagtagtccagagattcgattttacttaactttttgttttcttcgttgatcacttttacggtgtacacagtaattttgtcgagaccaccagtgtcgacgatttcgcctctacttttcattctgttgaacaggtcgatacccgcgtctgcttttgagttgtttaaccgactgcgagtcactgtgatcttcttacgcgaggcaatctttttcagatcgatggtaccttccactaagccagtaacaatgtctttggctacagtgtacgttcgccacgtactcggcttcctttgaagcaaatctccaaacatggccgtttccacttcctcggtggcaagtagacggtttcgtttacgagcttctaaaccgcgaatgatgtagctgttctcttcgtcggtgtccatgatctttgcaaagtaatgtttctgaccaaaaatgacgaaaggtagcatcactttttcgtgctccagtttgctcggtggtctgaaaatggctttgcctggattgagataatgcaggtcgttcagttccttcgcaacacctttggatatcgcattagtgattacacacgcttgcttgtagggatcgtgttcgaacttatctatatcctgtcgatcgtctatcgatatccaacctttgttcaaaatactattgtccttgtacgcggtgcagagctcagcaaatgtcatgttgaaatgaaacatgacgctgtcggtatcgccatacactgtttctgcattacgtttgtctctcaagtaccagtcggttttctgaatgtgttgacgacccgtagaagtgatgcaagcgctgactttgccctctcccatgtgcggcaggataccgtagaaggaattagctatgatcttgtgcatgtcactcttcactttcacaagcacgttgtcattagcgttatcgaacgtacctatcagtctcttgtacttgagtctagcattcagaactccttcccaaacctcgcagtatgttgacttcacgtgcttgggcgttaagaagcaaacgtagttgttggcttcatcttgagacaatcgcttgacgtccgtttctttatgatcgtcacgcacgaaaatgttaatcatgacgtagtcttcgttctttttcaatttgtgctcgactatggtttttctggacacaatggtttcgggtccgaagtttccactgattcctatagatggatacatggccgagaagtctagacaagcaatcggtttgtcgaacacaacaccaggcgatggcagatacacgtaggctccgtcgtatttgcttttctcatcgaattccatcaacaagtgatcgcctatcaaactgtgaacttcttcacagaatgtttcgcacgtgtagtgatcccgaaatcgccgaccacacaggccatttttgtaagtgtgtaagaaatctctaataggttgccctaaaacaccatcgtcgttggaattcaagtactttgcaaagcgagctatgtcgtcggtatactgcgacttcagtttcagttctttgctcacgtaatcgtcgaccaagtttcggattgtgttagatgcagcgatcgtgcgtctagacaagtagcggacaaaggctgccagttgtttagtaagcgactgttctttttctatcagatccgacttgtactgattcagtcgtctgcccttcgcaacgttaaccggtgagtatctgcccaatctcttgtctttgtagtaggcatcgatgagaccttcgatatcgtattcgttctcagttggttcagtcagaaatctcacatacagcatcagatgtgtcaacgtgtagaaatgaccaccgtgtttcgtgtttttcgacctagcgttctcgaactgctgtttcagtatctgcaaagctaaggaaaagtcaatcttcttgcaatcaccatacatggcgtgaaaatcaaagtgcttctcgatcgttttggttttgatcacgcccgactcgaacttgtctatcagttctctagtatctggatgcgtcacgtcgcgaacatcgtacaagtagtacttgagtagttgagcgacgcacaacctattgtttactctaagcggtttgagtttcatcttctgcaacatgccctttcttctgaacgaataataaaacataggtgcgagcataggcgttttctgcgtgttgaagaactcggagtgaggaatcttagaactgtacgaactggtgatgaaaaacttataacagctgaaattgtcagttgtgtttatcaacgccgcacacagcagagaatctaccaggttatacttgagcagtttactccgatccactattccgtttgatccgtccgaatagaaaagaacaggtatttcagcgtaactgacatcttctttgccaacacccaagttggatcttgccaactcgtcaagtttttcgtttttgtgacaacggtacagatcgttaattaacattccaggaaacagtttatagctcagttctagcaagttgttgtcttctagcatagaaatgtctccgttcgtttttctcaacctcgatgctttcagagctttagcgacaagaaacttgttgaagccgaaaccgttcattgcagacaagtcgtgcacaaggtctatgtcgtacttgtccgctgccttcaataacacttgtaagtcaaatccaagaacgttatagccagcaaggtagtccggcttacgtcgatcaccagatgcacgaacttctcgattagctgcctttcgttctgcacgcagtatatttccggttcaggcagctgctcgttgctaaagaacctacgcatgtgagagtaatcgtagtaatcactgccttctaatgcgtcgttcacagtcaagcctatgactctgtacagtctgtctccttcttgatacactagactgatttgtatgatctcgtcgtcgatcttatctccgttggcatcgaccattatggtttcaatgtcaaaagataacgtcttgtgctgataagagtagtccttgatatgactatcgtcgaccacttgtatcgacttggcatctccgaacacgacagtttccgattgcacgtaaggcattttcatgagcagaggaaactcgaaaccttttggcttcttaatgagtctgcctttgaaatcagcgttcgtatagttctcgtacaagtcgtaacagaactcgttgatgaacttgtgcgagttgccatagacgcgttcgttgttcacaaacagttctaatactctcttgttgctttcattttcgctgaagaaacactcgcgcctgaacgtgtgctgtttgtaacgcttgttcacgaagtcgtattcgtcagctgcagcaacggttccacgaaacgttcctctactctcatccgacacgtaatgagtatatcgctgacctatcaccgtaaccaaatgtttgttgtcttgtcgaacgtttcctccttcgtcacactcgtagcactgaatcactaccacttctgtttcaccttgcggattccgcgtcacgtggttgaatacgtgttcaggtatcgtgctggcatcaatcttgttgctggagcaataagcgaacagttgcttgttgctcaacgtagtcgttgtcatgtcatgaatgaagaaaatgtcatccgctgttgcagaatcacacatcttcactcgatgagagacatcagaagactgatctagtttgagttaagagcatgctttaataaccgaaatgaatgacaaaaaataactttttcaagcgaaaatctgaactcttgtgcgtcggcaagaccaacacattactccgatctgaatttgaaaaccaagtgtgctaagacggatgacaagttcatgtgtacatattctgtcagcattcgtccgacttctaagcaaaagcgaacgttgaaccagatgctgaatgtaagtaactacgcctataactggtgtaattacctggtgaaggaaaagaacttcaaaactaagcagttcgacttgcaaagaattgttgctaaaacgaattcacacgacgtatcagacgagtacagactttccggagacgactggtttttcgagaacaagatgtcctctattaagttgaccgcctgtaagaacttttgcaccatgtacaagtctgctcaaaccaatcagaagaaaacaaaagtcgatctcagaaacaaagacattgctcagttacgcgaaggatcgttcgaattgcagaaattgtttgtcagactgctaacggaaaaagacataccagacgaacgaattcgacaatcgagaattgctttgatgccagacattttttcgaaatctaagaaggactggaaagaaaggtttctccgactttcaaagaaagtgtccaagataccgcctttgagccacgacatgaaagtgtgcaaacatcgaatggaaaatttatactgcagattccttgcgatccgaaatacacgcgaaggacacaagtgcacacatcggactcgatatgctccatcgatccgggaggtagaacattcgccacctgttacgaccctagcaacttgactgcgtttcagatcggaccggagacagacaagaaaagggtcatttatgaatttcacgacaagatcaattgggttcaccatcttctgtcgtgcgctcaaaagaaaaagcagacacaagctgtacaagacagaatcggacaactgaaaaaactgcacctgaaattgaaaacgcatgtcgacgacgtgcacttgaaactgtgctcctacctggtcaagaattacaaagtggtcgttcttggcaagatatcggtttcctccatgttgagaaaggacagaccgaaccatcttgccaaaaaaggcaacagcgacttgctgtgttggcagcactacagattcagacagagactgttgcatagagttcgtggcacggactgcgaagcgatcgctgaagacgaacgctacacttcaaagacatgtggaaactgtggagtgcaaaacaacaaattgggtggaaatgaaaagtttcattgtaaaagttgcaactacagaactcatagggacgtcaacggagcgagaaacattctttgcaaatacttgggacattttccatttgctacataaaacaaaaatttaatgacatttgcttttttagggctcaattatttgccttctcgatgcatttattgccacatattttgctaatgcagtttctggggcaagaatgtgttcaggtaaaaagagttaataaccgaaaagaatgacaaaaaataaccttttcaagtaaaaatttgaacccttattcgttttattggattgattctcagtttcggcagcacaactagattgtcgctcacgtagataggtgtagatcgtttagcaatgacgttcgttcgctgctgttcgttagacaatgacgtgtgactgtgtaatgaagttcgcacggaatactcgtggttgtgttcgttgtgaaatacatcgtgtatgagttctggacaagacacgattctgttgttgaacagaacttcatcgcgagcgtgcacatcgatattgtatatggcgttgatgggaaagacgatctgcttgttcatgtattctaacatgtcaattacatgagatccgtcgttggtcaccgagtacctaggaatagaaaactgaacttctcgctttgcactgtcgagtagcagtcgtacgtgaccgggtttcgttgggtgtctcgtgaatgtgaacgtaggtgccgtcttgtaaacaaacattcccggtcgaccgaagtagctacaatacgctagacgtcgttccacggtcgtctttgtgagatctttggtcatgtaaacagagaagctagggtagttctcaactgcttttttgccaatgctgattaattccttcttatatttgaatactcgagtaggatccatgtcaacctcgtactgcgtgttccataactgctcgaacgtgtgtatcacagtgtgtggtgctacgtcggccgacttttccaactgaaactcgaaagccgcgagaggtgttggattcatcctaaagagatacttgttggaggacgctttggccgaagcgtcttgtagtttgagattgtactcgtcgagtttcagttgcagtttgagcttttcgttctcgtcctgcttatcgatctgtctgttcttcacctgagcaagcaagtctgccttgtatcgttccatgtttgctttctgttcagtcaacagagcggccgactccaatcgcttcatttcgagctgaccggcgaactgcagcttaaggtcttctatctcgcgattcgttctctccttgctgatttgaagatcttgtttgaattttcgttcgcgatcgttttctaacgtcttgtaccaatctctttgtctctgtttctcgctctcgatctcggactgcactttgatgatctgaaactgatgttcgtggttcttgttcaacgtttctctattcatggagttttgaacttcggtctgccaggcgtctagtttcagtttgcctatacccagctcgtactgcgtgttgacgctgtaagcctgactctttgctttgatttcagcaatggctatggtcgattgtatttgattcagtttgatatcgtgctccatctgagtcgactgaatctccgcttgtaacttggccgcctctagatcgttgacgttctccttgtctcgagtttctttcaacttcgtcacttgttcttgcagttgagagagaccgcgtaactcctcgatggcttctactagttctctctgttgatctttcaagacgtcggtctgagtttgtatatcacctagcacggtttgatgttcactaacgtgtttggcagtgtcaagaagggtatcgttcactttctttatctgtgatatttcggcactgtatttactagtccgcggatccgacgatatgtcggctggaaagagatctggaaacttggcatttcgtttgtcctgcgcgtgtgtctttggcttagtccgtttatctttattcgcttgtttagctcgtttctcatgtttatcacgtttatcacctttatctttatttgctcgttcggccgtatctagtgcacgtttcgagttctgtctcttggcgataattttgcgtcgacgttgtgatacgggcacttttggtaaggtttcgtcgacggttggtaattgaaagcgtacttgtctgatatgcttgacgttcgtgtctcgtgtcggctctggttgataattcgtctcttcgaatctttccacagacatgtctgcgttaagatcaagtattgtgttctcggtttgtatcaaaagtgtctgtggctgctctattttaatccgtttgggttcttgttcgacactgtccgcttcaagcgagcttccttgatagtcgtaggctagcagtcttcttttagttgcacgtttcctctgcaacgtgtctgtggcattgggtagttcgacgaaagcagcatcggttgcatgcaatccgattgcatcgttcactctagcaaacatcagaacgtagactataaagttggaatcagtgagttggtaatcctctccgaagcagctaatgtaatcgcatgcattatcgattgtctcgaaatggaggagtacgggcttgccaatttctgtgagcagtccgctgtttacactgtgtggctgagagttgaagcagtaaaacttgttgtccttgccgaacaaagcgagacacacgttgttttctacaaaatgaagtatgagtttttcttgttctccgtggtactcgatgatatcacttaactgcttcagaaggttcttatctacctttcccacgcatgtcttcgtttctagtcggattctgattccaatgccttgaatttgaatgtaacgtggtagctcgatgggtaggatatgccttttgcgtttgttatgacaaagcatctggttgtaaagcagattgccataaaccatcatctcgtcgattctcgaaccgatatcgaagtacgtagcatagataagtgcgagacaggaatacacaacactcctagcagagtccgtcgatttcctcgtgttgaatatcgaaaacgttactctttcggccttagtaacaacgattaaacactttggtgctttcgtttgcaatatcttctacgttgacttgaaatgaattgaccaacttgatgtgtctgatgtctaacggtgtctcgtccttggtcaatcgaataggaagtaacttgaatctgtctgtgcggttgcacaaccattgtacgtggacgataagttctgttatggttttataaccagtcagagccgcaaagttcactttgacatttccgtgtggattgaaaagataaaacgcgtcgggtaatctaaacagtgcgaaactgtgatgctcgttcaccagtagcaaccaaaaggcgtgagtgtcgaatactagttgaatgccttcccagagaccgtttatatcgtaatcaccaagcgactcgttcaatttcgagactcgtgcatacacgtttctatagactaaactctttggtaagaagtttggatcgacagtctcgtcggctttcatgtacagaaacgtaccaccgaatatgatcgattctatgtcactaatgctgattgcgtgtctgccaccaaattgtgcaaagaacagagccacaatattccaagagaagcactgatgctttctatgctcaggcgccagctcctcgtcttcgaagagtttcttgtttgccacatattggacgtaaggcgtaacattaaggtcgctatttgaacctctgaggtttttctcgtccgccagtgtcatgtcgatggctttgggacttaggatctttaatttcacatcttgcttttctagtttcaaaggttctttaattgtcggtatatgatcaagcgcttgtttcgtgggttttgtctgttcatcaatcgatggattttgttccgtttggacaatcggcgtatcgaatgctagcattcgtctttctgaatcagacgcgttatctttgtctgcattgctttcttcttcctcgtgcaagattggtaacgtatcttcgctagctgacgcgttcggttctattgactcgggcgaatcggtcaatgcaagtaattgtgtgtttgcgttggactccgttccaatatcattctcgaggtctttcttgtccaagctatcatgtgggtgaatggttttgtcgacacgatcatcgttcgagttatcaagtatcactgtgtcatcagatctagacatactagcatcgccaatgatgaccgtacctgccgcagctgaaatacttgcatccgaaattgagatgtcttcattagcggcgtgttcattgtcaatatcggacggaatgttcacaggaacgacaggagtatctgtatgtttgtattcatttcgttcaacgttatcgaaacgttttgcaacatctcgtacatcagggtttcacttgcctgtcttcaatgctttgcctgttctggtcgtaaacagaacgaatccagtctttggtgtagtttgtgactaatcgtttgaatgtcttgtagaagtcggacttcgttgtttcgattacagactcgtcgatgtcaatcttcgtgttatcgtttactgatggatcgtcgagtaacagagacggtctactgctactgctacgcttagccttctttatttccttcttctctgactcgacaacgttcaacttgtgcgattcactaggtgtgttgttgaattcatcgtacagattgttcgcctcatagtcaatgccgttatcgtccaaattatcaaactgactcatgattttgatgaactgctttattgcattgcggctcatagcaaagtgaacatttacaaaaatgttttagaaccttaaatagtttaattcgaaaacaataggcctgtatcagtgttctcgtcgcggtcgtcgtcgtaactcttacgtttgactgtcgttgtagttgtctgttcgatcggaagcttcaccatcttcttaaccgcaacctcgattgcgatgtaaatgccgtacactcttgcacattcgtccagggttctgcggttgacgaagaaaacctgaccgtagataagcttgaagaaattcagcacgtacttttgcaacacctgctcttcgtcgacgttgtataactgaataccgtttctggtgaccgtctcttgaatgcagaccaggtttttcaacactcccttccaaagttgtttcagcatttctctgtacatcagcaacgtgttgtcgtctattcgtttgtctagattgtctctcctcacgcgaccttc

SEQ ID NO: 4914 - DNA, 11399 bp, Mercenaria mercenaria
  source 1..11399: mol_type = other DNA
aaaaacataaacaggacaaatatttacaaaaagaatgggatgaaacaataaaaaaattacaaaaaaagaaatctaataccaacaagcagaaatcgtcaccaagaaaaatcaagaagaacaaagataagaaaaccactccatcattgcataaggaaaatgattcatctatatctatggatgttctagagcaggtgatagaacagtcggtccagaccgctaatctgcaaaaacagttaattgaaagccagacagcacaagtagatttactactgtcagcaaataatcttgtaagagacaaaatcaaaccatatggtaactgcttttttgaagctagcgggaagcaaattggcacagaagcctctcatttaaggcaggaactgtgtaagtgtcttgaagagaatatagaagaatacatttcatttatgttaaaccgtcatcacccagatgatgaggaaacatttgtggctgattacttgtcagaaattgaaaaattgaaagttgatgggtattggacaagtgctgtggcagacctctttccattagtactggcaaattactcaaagtgcaatgttatcatctacacaaataatgttgaacatccagtcattacaattaaaccaaccaaaaatgattcacttgccattccagataacaaaacagtgtaaaattggtttatacatcaattcggggaattttggaacactacgatggataccttgaaattcaagactctgatatatactttgcctctccattatcagatgaacattccgacaaacaggaacagaacaagaatacatacggctgtcaggtgcagagtatacatcagcagatggaaagcccaaggccgctaggtcggtagagccagtagactgtagcaagtgcagacagaaatgtgacaaaaaaaataacaacagaacaaaggcaacagctctttgaattattttggtcattgtcaagttatgagagacagaaagattatgtttgtaaacaggtagaagagacagacactaaaacatatctagacaaagatggaaagccaaataaaaaacgaaagcaggtgtcaagaaagttttattttgaaattgaaagtaaaaagtgttctgtctgcaagacgttctttatgaaaacgttgtcaatcggtaaggcatatattgatcatgcgttgaaaaacaaaaaggacggacattttacaggcaatgatttaagaggaaaacacgagcctcataaactttccccaagcagaatagatgcagtgaaaaagcatattgaatctttcccacgtataggtgctcattatgttcgaaaggaaacaaagagacaattctttgggccacatcttacactgccaagaatgtatgacctctatctgggggagtgcaagaaaaacaagagcaccgccttgcggctgctgacgctcatctgatttttttttgtataatagaaatattgtcctacccatgattttctaagtctaaaaagggccatcattcttgcaaaaagcaggatagagttatgtttcttgatgtacagtgtccacttatgattgtgaaaaactgttgcaagttttaaagcaatagctttgatagtttatgagaaaagttgccttaaacataatactcaaccaagaaaatgattttctaagtccaaaaggggcaataattattgcaaaaagcaggatggagttatgttgcttgctgtacagggtcagcttatgatggtgaacaagtgttgcaagtttcaaagcaatagctttgatagtttaagagaaaaagttgacctaaacataaaacttaaccaagaaatctgatattttctaagtccaaaaggggccataaatcttgcaaaaagcaggatggagttatgtttcttgctgtacagggtcagcttatgatggtgaacaagtgttgcaagtttcaaagcaatagctttgatagtttaggataaaagctgacctaaacataaaacttaaccaagaaaactgattttctaagtccaaaaggggcaataattcttgcaaaaagcaagatggagttatgtttcttgatgtacagggtctgcttatgatggtgaacaagtattccaagtttaaaagcaatagctttgatagtttaggagaaaagttgacctaaacataaaacttaacctagaaatctgatattttctaagtacaaaaggggccataaatcttgcaaaaagcaagatggagttatgtttcttgctatacaaggtcagcttatgatggtgaacaagtcttccaagttccaaagcaatagctttgatagtttaggagaaaagctgacctaaacataaaacttaaccaggcaacgccgacgcagacgccgacgccgacgccgacgccgacaaccgctcaagtgatgacaataactcatcattttttttcaaaaaatcagatgagctaataaaacaaagccagttttattggaaagatacagaaatgtttttaatacaaattacaacctttcttttcatgtaccaaagaaggaccagtgcaacatatgtactcagtattacacagcacagcgagagggtaaaatgacaaatgaacaacagaatgttttcgacaaacatcagcaaaggaaaaagcgatctagagaagagaaagctaaagataaacagaaatgtgaaacccaaagtaacattcatgtagcttgttttgatctccagtcagtgttgtatgttccatgctcattggttagcctaatgtactacatgcgtaaactctgctgttataacctaacattttacagttatggagacaaacaaggcatatgctttgtctggtctgaggtagatgcaaaaaggggagcatcagaagtggctacctgtctaaagctacatctccaatcacttccggcagaaacagaccatgtagttttgtactcggatgcttgtggtggacaaaatagaaataaaatcatagcaagttgcttactgcatttggtgaataccattccaaacataaaaataatagaccataaatttctagaaagcggccacacacagatggaggtggattcaatgcacgcagctgtcgaatttgctaaaaagaaaaccatgatttttgttccgtcacagtgggacacagttattcatatggctagaagaaaaaaagccctataaggttgtgccactaaagtacactgacatcatagactttaaacaatttcagagtaacagtacaaaggtacagaaaaaatcggaaacaggaaccaaggtactctggtcaaaaatgaagtggcttagatatactaaggaagagcctgatgtctgttttttcaaatacgattttgatgatgaatttgaaaaattgaaaatgtttggctctagaagacaacaagcaaatcctgttgtatctctaccaatgaagtatcattcaaagatacccatttctgccgcaaagaaaaaggatctattgcagctatgcaagagtggtactattcctgaagaattccatgaatattacaaggctttaccagcaaaaaacagtatcagagattgtttgccagagccagatgcccttgaagattcaagtaacgattctgatagtaactaactaaaagtgtcagatttactactacatttcaaatgtgactgacaatgtgacagtgtgtgatttaagacaaattctaaacatgctaaatatgtgtattaagctttattcaagtgcttatattgcataatattacataaaatgtattatgaaattcactaaattgttatagatgattcttgttacttgatgaaagacagtctaagaagagccaaatggaggcatttacctataggccatttgtgacttgaaaagtcttaatctaagacaaagaatgcatcctgccataataatctatatttctatagaatatttttgtttccaacaaaacttacatttatgtcaacattgcatatgccagaggattctattgctttatagaatgtttttgacacttacaaaaactgtgatatgcaacatcttctccagctatcagtttatagcatgttctggctcagtactgtttcgaaagttataatggaatcatacatgccaaaaccagatatctttcaatggaatattttggttatttagatttttgcaaaaaaatggactttaagttgtgccaaaacaattttttcgaatttgacctaattaactaaagacatgtacaaaatacatatatcatgtattaaataatactatcataaataatactatagtttttatatctcaaaaacccttattataaaagagaagcaacaaaaaaatgctctcctgtaaaatttaaaaaaatggacatagcaggttctggaacttacccctcgatatgacaaaagtttaccttatcatggttagataagaaacgttataatcaaccaagtatatggaatgtatttttttctggtttgttttttgtacatgtgtagtatatattttataggagttattgttacaaagataaagttatatttttttggtaaaaatgcacgcatcttcgacttagctatgtaaacaatttttaatcaatttattttatttattttgttaggtttaacgtcgcaccgacacagttttaggtcatatggcgactttccagctttaatggtggaggaagaccccaggtgcccttccgtgcacaatttcatcacaagcgggcacctgggtagaaccacagaccttccgtaagccagctggactgcttcctcacgtgaagaattctacgccccaaatgaggtttcgaacccacatcgatgaggggcaaatggtttgaagttattgctagccattactgtatatacacgcccttcgcagttctgtcgttgattgctttatctcattcaacccgagtgacgagatatctcgtcatgtgtcggaatcagcgtatataaaatgattcataattaaataaataattataaatctttttttttcaaacgcctataaaagaaggggggcgacaacgtaaattattattttctttataatgaagagaactcgtgaaccgattactttatggaaggctgcccttgtcaatggtcgcgcgacgttcgaatcatggatcgacaaattaaaaatgctcgacctgaaatgcgaaatctcgacggctgaaccgattcgctattccgatctaaaatcgaaatatcgtaaaacggaagataagtttatgtgtactttttctgtcggcgttagaccgacctctgatcagaaaaggattttgaatcggatgctcaaagttagcaattacgcctacaactggtgtaattacttagtcggggaaaagggcttcaaacctaagcagtttgatttgcgaaaagtggtcgctaaaactaacttgatagacgtcccggccgagtacagattacccggggacgactggtttttcgataataaaatgtccactatcaagttgacggcctgcaagaaattttgcaccatgtacaaatccgctcagactaaccagaaaaaacaaaggtcgatctcagaaacaatgacactgctatgttacgcgaaggatctttcgaagtgcagaaattgttagtcagattactgatgaaaaaagatatcgcagacgaacgcgcgaggctatgtagaatagcgttgatgccgggcaatttctctaaagataggtttctgagactgtccaaacgcgtgtccgagatacctccactgagtcacgacatgaaggtgtgtaaaagagccaacagaaaattcgtactgcagatcccgtgcgatccgatctgtacgcgaaagaaacgagtgcgcacttcggactcgatatgctccatcgatccgggcggtagaacgttctccacttgttacgatcctagcaacatgactgcttttcagatcggaccggaggcagacaagaagaaaatcatttacaaattccacggtgaaatcgattgagtacaccgtctcttatcatatgctcaagagaaaaagcagacgtaagccgcgctagacagaatcggacaactgaaaaaactgcatctgaaattgaaaacgtacgttgacgacgtgcacttgaaactgtgttcttatctggtcgaaaattacaaacttatcgttctgggtaagataacgatctcctctatggtgaagaaaggtcgtttagccagaagagcaaatagatctgctctgctggcagcactataaatttaggcaaaggtcgttacacataagagtttttgggacggatagagaagccgttattcaagacgaacgctacacttcaaagacatgcggtaactgcggagtgcaaaacaacaaactgggtggaaacgaaacgttttattgcaaaaattgcgacattacaaaactcacagagacgtaaatggcgcgagaaatattctatttttttatctgaatttatttccgtttgcgcaggcatagaattatgatttgttttttcccaggtcttactcagcctggctcaatgcggaatattgtttgctgttagactttgcttttatgctcattctagggcaaatgatgttctcgggtcgaatgagttattggttgttgaagcccacgggattgtacgtcttcaaaaacgtgtctctgatcacatctaaagcattttgcttcctctcatctagggcatccattgcgtttttttctaatctctacctcatcatttgttatttttatttctgaaaacttgttccctctccggttgacagaaatggatgatgtatttcacaaattaagccatttcatcatcattttcaaattcgggtggatctataccataaagctctaagacaaattcggtactccttgacataaagcggttgacgtaactactcataaagttgataaatacttcatttcctgatccaggtgcaagctttgcatacatagtgatcacaaaattttaatttctcggctaaaaatgatggcccattttattttatttttttaaattacaacctttaattataaaaaaatatctatataattctttaaaagagataaaacaaaattatattgaatattgtgcggcatttatcttatgtcatttgtagatcaagctctttgtgtatttaatacattcttttgcagtcactgtatcagtttttgtgcatatagatgttgtttttttttctctttttttgtttctttattttttgctttaaatttcattattgagctcagagttttaaataattgtttacacggcagtagcatgtttaactgtacattgataacacagagcatgaaagcgctaaataatcattatcaagatagacaatccaagtgtagtcgtatctgtcaattacatgacgatgtagatcagttgcttcctctaatgtatcataaatgaaagtgcaccaagctgtccgttcatgtacaactgtcttctcagttgctctccaagaaaagtttgcgcagtcttgtcattgaccgtcctgtgaatgcttgaaacaatcacattttcacagatgctcgaatcttgcagctaaggctctacgtcaagtatttgtcggctacagttgcaggagtttatgaggcagcagcagaaaaggcgacactactctctgcaaagagcatgataagacaagctgctggatctccattgcaacgagatatttcgagtcttgcagctaaggctctacctcaagtatttgttcaacgtcggctacatttgcaggagtttatgaggcagcagcagaaaaggcgacactactctctgcaaagagcatgatgagagaagctgctggatctccattgcaacgagattgtatatatatatattaaagtattttctatatatatatagatttaaaattttgcatctgattgaacagaacagagcatacactttatttatatatttcaatcttacaataaaacgaaaaaaaattctatgtataattcatatcgttcaagttatttgagccacaaagtaaaagatttatatatctgttgcacatttgcttttcaccttcctcagaatgtccaagacacaattcaatatttttatatacgtccatgaaataattcgcgatagcatagccagggcttttctatggctttttgaggaaaagacccctaatttggggaaaagtatcaagtaaattttgagtttttctcaattatataactttaaaacatttttttcaagtttaatgataggattcaaatgcattacaaattaaaagaatcctccaagaaatttatagaattcagaattttgggactttttctcagactatttgtctgttgttatgctggagctaaagtattagctaacttttctgccactgttcacttacacgattttcgtacccaccgccgatgagaaaaaaaagtcagaaactaacaaataaaacatgcgtgtacgtaataaaattatttcctaatttttttattgtgatccgaaacatatatgaataaggtttagttcgagattttaatcatttctcatcacgatggctagtaataatgaactgttattagaaaacaaaaagcttcaaagtatggtagaaaatattttggaattactgaaaaaacacgagaagcggcttccaccgtttgaagttccgtctacagaaaactggatggatgagctgaatgaatcagaaacgaacacgttgattgaattatttatttgcttgtatatatctcattttgtttaccgatagtctaagactgacaaaatgacatttaatatgagtaacccatatgcggaaaactatctttccagcgaggcgaataataccaccaccgatgatattttgagtatgttctgtgatgacgaaatatatacagcaacagcaacgggattgcaaatggaaaatcagataaaaactaacaagagggccatgatggccctgtatcgctcacttgagtaccattgctgaaaatgatatgatcaagttttgacatatagcacataggcatacacattttaacaagatttgaacaaattttgtagaggtccactaggcaatgctacatgtcaaatatctaagatctaggccttctggtttatttttagaaaatttggaagatttttctatctacaatcaagtaaccccatggggcggggtcaatttgaccccggggtcatgatttgaataacttttgtagaagtctactaggcaatgctacatgtcaaatatctaagatctaggccttctggtttatttttagataatttttgaagactatcctatgtaaaatcaagtgacccctgaggcggggtcaatcttgaccccgggggtcatgatttgaacaaattttgtagaggttcattaggcaatgctacatgtcaaatatctaagctctaggccttctggtttatttttagaaaatttttgaagattttcctatgtaaaattaattgacacctggggcggggtcaattttgacctcggggtcatgacttgaataaatttggtagagggccactaggcaatgcttcacaccaaatatctaagctctaggacttctggtttttgagaagatttttaaagtttttcttttggttgccatggctaccagagttctgcgtggaattcaattctttgaataatttcgaaagggggccacccaaggatcattcctgtgaagtttggtgtaattctgcctagtggttttcaagaagaagattttttttagaaattgttgacggacgacgcacgacggacgacggacatcaagcggtcacaatagctcactctgtgactttgtgacaggtgagctaaaaaagccagcggataaaaaaagggtaagattttttttcctgggcagattgtaagctttgaataagtgggattaatatcaaaattaatttttgtctacagagatgtattcacaaaaaatacttactaagaaaatggtcttctttttttttttttttaaatcgtagtaacgtcaagaatgttaccattgcgtcgttgctaaggttatttcagagtttttttgtttttcttcttcttcaggtaaataagagaccggcaactacaccgatcataaaacaagacaataagagggcgacaacaagtttacctgttgaagaagacgattacatggaactaacaacccgacacacagaatttaacaatgtgtaccagactgtaatagtgttgaaaaataaatacgccaccaatacaaccattcaaaaagacatgaataattgtgaagaattgttaaaaaacatgatatataatatatttatttattttattttgttgggtttaacgtcgcaccgacacaattttaggtcatatggcaactttccagctttaatggtggaggaagaccccaggtgcccctccgtgcacaatttcatcacgagcacctgggtacaaccaccgaccttccgtaagccagacacaacggttctagaacaacatcgagagcatgtagtgataaacaaaaaaaaatatttttaaatatgagaggattaaaaatttacttgaaatattttttttttaaaaaatataaaaatattttggtctcagtaggggttgaacctacgaccctaggaattgtagtcaaagttggtttatagaaaaaaatgaatactcttcaaaaaggggggtagttgattagaatggtcaaactttaagtctggtgtgtaatctggtaaacctgataaataaaagttctctcgcttgcagctagtaaagccgccattcatgattgctgaaatggatgaaaaaataaacaacaacagaaaacagaagtaaaagaatcgattgggacaactcaggtagatattttatatttttaagaacagatagatctactaaagtaagtgaatctaagtgaacacaagggttactgtagagatgtcttccaaaaacgaggctcgccactgtgctggtagagatttcagtgacatgggaagtttgaaaaaagataccctgaaaaatggccctaatcaggtccatgatcctattctacttgtaccactgtgttctatttataccagtctggtgtaccacttttaacatgtatacacatgtatatagtggtagaattttaccatgtctcaagaccttgatgtcacttccatggtagatgtagaacaggcctggtgattataaagcgtttttcatgatcaactctattctatgctcaaacattcaacgtttcaaacagtaaaatgtctcgtgttttattgaaacttttatattagatcgatagcctcaaggaaagcaaagttaaatttcctgatgtagtaaagatgtttaaattgtttcagtttagagaagcaaacgaatgccccctggggcttcgccctattacttattgttaatttgttactctgattaatttatttcagcagcaagaacgcaatgctttcaaagtaacaaatagcaggagaatgaggacagtgttggggtagtagcagaaaaatttctacagc

SEQ ID NO: 4915 - DNA, 11545 bp, Mercenaria mercenaria
  source 1..11545: mol_type = other DNA
acgagtccactacacctattttgataccaagtaagtctcgacaatacatctacatcgcaaactcgattcttaagtatctactttaaaaacgtacttaaacagtatccgtgatttgaacaccagtacataatctaatgatcttgagaatatgcggactcaaactggagactaataattttgatctagacaattgcccatcagcttgaaacacaaatgtgttcatccactttcgttatcggtatactaagcatatagtcaaaagtcactaggatttcgctctttagtgataaatgaaaaacataccttatgaaaaaccaactgcaagtatcagttaatgctggatatttgtacactttaaccaaaggactcttttgtacaaactcgccgttttgtcaaaagtaaaagacaagccttttatatgaataccttcaaaaatgatcattgttttcgctttacaactaaatcaagtctattaggaaatagttggtcttaattaggcatctatgctcttcggcatgtaaaaatattgtgtccgattctcaaatatgaattgacattttattgcaatatcaaatttagaaaaaaaatgaccagtaccaaatttcttcgactctgcgtttgtccagacttgtcactggcatgtttcgtgaccactctgacatcagagaaactcttgatcacagggcctcgaaagatggtcgcattaaaagaaatttgggatagagtgccaaatgaagaagccaaagtcactttcgaattgacaagatcagtatctccgcaagacattgtcatgccagtccccgatacttgccgcggcactcggacgacaaggctattcaaaggtgtattgcaatgacgggcaaactaattccccgcaccggcttcgttgcctaccagatgcagagtcgggccgaagccagcattgacagtttacccgtgctgatctatgaaagtcaatctgaatgagaactttcggttgtcgttcagtctataagtgtttttgattttgattgtttgaaatgagaaagagatttgtgtttgccaaagattcgaaagttcgatatgacatacaccagagtcgggcttttaagtttttgtactaggatcatggcgttgcaagcttgtcataagtaggcaccctttggcatacagagctggtttgtatacccgatctagcaatcttagtggacgtcaaaagacaagatcctgtcactagacggagcctctcctacttttccaagcttgtaacgcctcgtgatggccaaaagcggttccttataaaacatcaccctaccatagtataaagctggtctaacgacaccttcatacttttggctgtccgtttttttttttgcctgaacttagcccaactctagcgatatcggttgccgttcggtccgttagcattagtaattttgatttttgtttttgaagagcaagagaagagagaaagaggttgcatcgttttatgtacagatgttacatgtcaaatatgtacagatgttacatgtcaaataagctgtacactagatacaacattgaatttgaaattttaattttttcaattacaagcaaaaatgttctgaaattttgatgtcacttatgttatcatgtagcagtgcgatcaagccaagagtcgttttcttaaattaagctaaacaagtaaggatacgaaaacgccccttgccgtactccatcaccaatgataaaagtgacaaagccctgtggagggaaacacattcaatatctacaataagttgtgcacaacttgtctatttacactgtcctgtgtctttggaacatggttggggtaagagtgaggttgggtgcgcaccataaaccggtttaagctccccagtggtgtttttgcctctgaccgttccaaggaggtgccccactatgttcctttgtttgttcgttttgtcctgatgtgttggctttgtgtgtgtgtgtgtgtgttcctttgtttgttcgttttgtcctaatgtgatggctgtgtgtgtgtgtgtgtgtgtgtgtggtgcccgcgtctgcgtgctgtgggtttcgttttgaggaggctgcgtttttggtgcgtagcattccctgtttgatatttgtctttgtttttaacaactaacaactaagacttaactagcatatctaaacatctaaacgctatcttatactaaggctgcgaaggtcccgtcgctctcgtttcaaactgcttgtcattgctcctaacatgcaaaaagatggagaaaaaagtggttcgttaattggctatcgcattttctggcgatctgcaaaggcactgaacgatcaacaggtgaccgtgcctatcgtcaatatcggaacgcagcatcaagatgatgcaagactcaaacggtagacactcagacaacctcgagagtaagtatatcatctcgagtgtcatttcaatcaagagagaactccggctatcttaggctggaaagatattggtcaagatgacgggcacaggagctcaaccgtctttccattttcggtatatcgagtctcctcgccctaaccaaactacgccgaacaccggacattctcaattgatcgaaaccctgtattaagttctagccgaaccaagacttggcatcgctatgccaatgtgcgttgccagtcttatgtcctaaccaaatcctaacatatgcatttcgagagcgacgcaactttgccaaagtactcaccccaggcattcttcatctgtcttgtactcttgttaccacgaatttaagccatacacacaagaaaaatgtaaaacacactgacgcggaaacaccttgtaattcacatggtgaaagccgcccaactgaacaactgagcttgtgcagccgcttataaaggcctgcctgccgaaaaataacaaactgtcatttcgacgtgacgtaacaaatgatttgattggctgatagctttcaacatggtttcgtcccacagaacgagttagacttgctgcacttcaacgacttgctgcgcttcttagacttgctgcacttcaaagacttgttacccaagcttgagcttgacttgctgcgcttcttaaaattatcgtaattctgatttaggtttaaaattcaatagtaatttaaagacacttctgcgagaaggtatttctaaacccgttttttatggggatgtggtttacaaacttcgtaagatcttgggtcatggtaattttccaaatgtatttgaaaagattatcaaacgttttattaaaagaggttacgacccaactgttttgggacataccgcatgttaagtgttcaacccgtttacagttggacactacgcttccctctttgattgcgtctgacggaagagggggaagactctatgatgagcagtttttaaatcctaccaggactgaactgttttgatatttgtcttttggcctgtttcgtcgggcccttaagggtgtttctcttgttgctctgtcttctgaaaaggcattgagtacatacgtttttggttcttaaggtttgctttttatatatttatacacgagcatttttgtgttttacatgccatgcctttttatttccattacatgtgttagagattcacctgtaggggattacttttatttacactgtcccatgtctttggaacatggtgggggtaagagtgaggttgggtgcgcaccataaaccggtttaagctccccagtggtgtttttgccactgaccgttccaaggcggtgccccactgtgttcctttgtttgttcgttttgtccttgtgtgttgactttgtgtgcgcgcgtgtgtgtatgcttattgttcgtcttgtccttatgtgttggctttgagtgtgtgtgtgttgttcattttgtcctgatgtgtaagctttgagtgtgtgtgtggtgcacgcgtttgcgtgctggggggttcgttttgaggaggctgcgcttttggtgcgtggcactccctgtttgatatttttctttgtttttttttgtttttttgctgcgcttcttagacttgctacacaagcttgagcttgacttgctttgcttcttagacttgctgcgctatatagatatgatgcgcttcttggacttgctacacaagcttgagcttgacttcctgtgcttcttagacttgctgcgctatttagatatgttgcgcttcttagacttgctgcgcttcttagactttgcactttaaagacttgctgtgcatcttagacttactacgctatttagatatgctgtgcttcttagacttgcagcgcttcttagacttgctgcacttcaaagacctgctgcgcttcttagacttgctgcacttcaaagacctgcttcgcttcttagacttgctacacaagcttgagcttgacttgctttgcttcttagacttgctgcgctatatagatatgatgcgcttcttggacttgctacacaagcttgagcttgacttcctgtgcttcttagacttgctgcgctatttagatatgttgcgcttcttagacttgcagcgcttcttagactttgctctttaaagacttgctgtgcttcttagacttactacgctatttagatatgctgtgcttcttagacttgctgcgcttcttagacttgctgtgcttcaaagacttgctgtgtttcaaagacttgctacgcttcttagacttgctgcgctatttagatatgctgtgcattttttttttaaatacataaaaatataaatctggtcacaaaacatcgccctgtggtatgccaaacttctcctgaaagaaatgaacacagtgggcgtcgccttggaaatgtcagtaaggcgggtctcatgcattcagttttcaaactttaatatgatcactgttttattgtaatcttttgcaaagtttttaatgcgctctaagtagattttgcacaaatacatgtgagacagctacaaccaagactaaaaataatatttgtgaaaattggcttcttactctcataaaagctgcatgttgccttcgttcaaagcaaacaacgactaggaatcgcaagagaagcctctctcctttaaagctttggaaagcggcacacgtgttcaagcaccaaaacctggagtgttggttacaattcgcgaaggatggagaagcgcacaacaaggtgtttgcatctgatttcgaacgaacaaggaagcaagtgaaactggaagacgaaaaaccattcatgacgacttttagtgtcggaatacgtccaattcgaaatcggaaaagagtgctcaacgagatgcttagagtgagcaatcatgcgtataactggagcaactatctcgttcgtgaaaagaacttaaagcctaatccgtacgaattgcagaaatatgtttgcaagaccaattctagtgacgtccaaaatgattttagaatggaaaacaacgacgactggtatttcgataacaagatgacaacgctaaaaacagcagcttgtaagtacttctgtaccatgtacaagtcggcgttaacgaatcaaaagaagaagaaaaagtacatcaagtctgtgagtctcaaggacaaggacgatatcaatccaagtcaagtagacttcgagattcaaaaacaattcattcgtacattgaaggagacagacactgacgataacgatatcttacgccactgtgtatcagccattgctaacaattttacgacgcgaaggatgtaagaaatcgatttctgcgcttgtcttaaccagtgagtaaactgccacctatagaacatgccgtcaagattgtcaagagaccgaaaggaaagttcgttttacatataccgtgcgatccaaagtacacgaggagcaaacggtacaacgaaccatacgatactatgtgtggcatcgatcctggcggaagaatgttcttgacaatatacgatccatcaaagccgcaggcattccaaattgcatctcgatgtaaagcgccaactaagccagttcgtgaaagccagttcgtgaaaaggtcaaaaagattggaaacgtctggcacaggaaaaagaaaagtcagcgccgcgttaggagcatcatagacaagattgacggtttgcacgcaaagatagactatgttaattcaaaaatgcaacctgccatacgtcgaaatcagcctcaagcaaaagatgatcggcaaagacaattacaaaaggtgtattatcaactaggtaatgctaatagatgggtgcatcttcgttgtacatataacctcatgcaatactcgtacgtagccatcggaaagataggcatacctagtatcattcgaaagcaatgtaatggaaaacgaagacgcatcaacaagaagtccgtaggtcatctgacagtgtggaatcattgcaagtttcgtgaaaggctcgtgtatcgggccaaaggcacaaagaccaatattattcaagatgaaagatacacatctaaaacatgcagtgagtgtggaacaataaacaaaaaattaggaggtggtgaaacgttcaagtgcacaaatcctgcctgcgattacattacaaacagagacgttaatggtgctaagaacattctaaggaaatcgcttggtatcggctcaattgcaacataccgtgcctgactttgaacactggaaaataaaatcggttgactcggcgtattccggctgaaccttgtggggaagcattggtgaataaaagggtccatcatcccattcatccaaagtatatatccgccgttgaaggtttatttgcagcaacaagcgtgcactaaaatgaacgtacacccataaaaatatcccccattttataggggggggggggtctttttcccagtcattttttccctttttcccgcacaaaaatcactctaaaacacccaaccttctcgcacaaacatccatttcagttcgattttttttcaaaactcattttggttgttgtactgtactgtgtggactcaaggaaatatgagtccttcaatgaaaataatgagtgagtgagtgagggagtgagattttacggcgaatcgacacaaaaaggccatatatcgccgaaaacaagcggtttgaaaacgtaaattgtaaagcatctctaaaaaacaattatgtaaaaatgtataaacatataaaatgtaaaataaattgtaaagcacgtcttaaaacatttatgcaaaaacgtatgtaaagggtaaaaatattggtgataaacaacattattgcaaaatgtgtaaagaaaaatatatgatttcagattttgtgataaatgcctatctgcattaaaaaggacaagatattgctgactgaaatgttttcaaactactctttcaaagattgcacgtcacagtatttactgcgctgtggaacgaagtccacacagtcgactaaaatatgtttaatagtaagcgatgtctgatatggtacaaattcaggttgttcttctttgttcagaagataagaatgagtctaacgggtatgacctaattgacaacgagaaagaacaataatgaaaactcaaggtagagctgcaagaataattataaataaaacgttccaaacaagaaataaaaaatgtttaaagtaagtataaaggtataacatacagttgactgcataaacaatctctttgtttatatcagctgaattataactatgccaatataatatattatgcatgtatatattatgtcactaattcattgccttggcaacagcataaatggatatatcttttaaggggtatttgtccaagaataaatatgatattaattaggttatgtgatagtgtaaattgtatttggttgttattgttcagaaacccacatttaaaattaagatgtattatttgtactttttaccaatctgtatcttcttgtgctatcttctataaataaagttattactattattctcattattattattacaatttctatggcaattctatgctacgaagaatcatgatctcctcagaagaattgtaacattaccaaccgaaacataacaccgaataaactgcagcatttccgtcgtaaaccacgcttcaataactttgtgcggataacttgaaacgtttgtcacagtgtatatttagtcgattgacgccgacttttcgcaaggagtgagtgagtgagttgggttttacggcgaatcgatacaaaatggtcatatatcgccgagaagaagtcatattgcaaacgccaactgtaaagcataaacattgatgtaaaaatgtaaagtttaccaaaaaacatccatgtaaaaatgtaaagaacactatgagtagtgtaaaacatatctaaaaacatccatgtaaaaatgtaaagcatatctaaaaacagttatgtaaaatgtatatacgtatgtgttaaaatatcagctgcaaacataataatattgcaagatgtaaacaaaaatatgaaatgttagattttttgatatattcctatctgctttaaaaacgataaaatatttccgactgaaacgttttcaaataactctttcaaagattgaacgtcataatatgtaccgcgctgtgtagcaaagtccacacagtcgattagaatatgtttaatagttagcgcaatctgactaaagtacttgatcttctaaacgaagatctgagaacgacccattcatattcgtcttctgtatattttggatttccaacattgctatttttattttcacaaatctatttttgtttgaaccaattagacaacttgtttgaatgtccaagagtaagaaaaatttgcagttaatccagggctcgaacccgggacctctcgcttacagagcaagtgccctaccgactgagctaaccggctatataacatctttcgacataaaaattgttgatatcaaaaaccacggctttttaaagcttgcagaatgttgtaagttagcttttgattggcaagcggaagggttgtcagaacgaggccatcaaaagctcgttgtcagatcctatgcgtagcgtaataggcatttttagtctatcccgatgacgagttgtatacccgattaaggacgtatttacctgtttacctgtgtaaggggacatctcaaaatatgcaagtgatataacgtggtgtaagtgtagcattaataatgacacgactttattcatttatttcataccaatctggtggttaatatcttattctggatatgtctcgcttaatttttaaacgttttagagtgaagttgtacacgtatatcaatttcccgagcatttgagtaatgttagatatcaacaggaagtcgctttgaattcaggctttgtaaccatgataaatgtaaaaaaatcaaacgtaaatgtaaaacaagagctgtccgtaagacagccaagctcgactgttcgaaatattgtcccaaaagcagggaaaaattacaaaaaatgttaaattatcaagagtttaagttcaaagtcggacataatttgaccaaaatgcatatcagagttatgggacttgatgctatcaactagttttataaccccgaagatacagtgaagtttcaattcaatatctgcattagttttggagatagtaacttgcatgtaaaacttttaccaaaagggggcatgatttgcccaaaatacatgtctaagttatgggacttgacccagtgagattggtaattgatccagaaaatgaaaaaataagtttcaaatctatatgcattttagtaatagctctatgtacttgcacgcaaaacgttaattaggattttctaagtccaaagggggcataagttggctaaaatgcaggtcagagttatgggactgatgctatcaattagttttataaccccgaagacacatgtgaggtttcaattcaatatctgcattagtttttgagatagtaacttgcatgtaaaactttaaccagaattttctaagtacaaaagggggcataatttgctccaaatacatgtcagagttatggaacttggcccatgtctaagttatgggacttgacccagtgaggttggtaattgacctagtaaaagaaaaaataggtttcagagctgtatgcctttaaatgatagctgtatgtacttgcatgcaaaactttaacaaaggtgtgacgccgacaccgatgccagagtgagtagaatagctagactattcttctactatagaattttaggcgtattgaaaaggctgcattaaagagcattaatgtgttatttagtaaagtatgtaacttttaatttcgagttatgtaccattctaaccctcattttgaaccgttggatatgccttactggaaattttgtcttactactccgacaggtcgaatgaaataacacaaaaattggattttctaatatcaaatactcaaaaattcgtcttagtatctcttctaaacaatcctaggataaaacgtgattgcgataacaggcatagcaagttccatctccagatgtcgcactgtccacgcaaaatgccacttatgtagccatatggtgactgcccgatacttcggtcttagtttttatttgaaagtcacatggctgatcgaccgacaatctgaattttctctttttttgaagtcacatgtcgggccgatcgaccgacattcgcaggttatatagcttaaagccatgctaaatatttcgtatcatgcaccgaccgtatatcatttccgtattcacacataaggaaagtggaatcactgtatcactgtatatcactgtattttctgctaccattctttttgtatggtgtttgctctgtcgcagcgacataacgacaaacgttatgaacatcgttatggcgcccagtcaaatgtcgcctctccgaacgtctcgtcccgccaaatgtgccccgctgaaggtcgccccaccaaacgtcaccccgccaaacgtcgttatagcgccccgctgactgtcaccccgccgaatgtctaactgccgaacgtcgccctactaaacgtcgccccgcctgactcagggcctgtgttttgcatagtactagccgtatcattgaggaagtaaatagatttcagtaataaagttactgctcggataatacttgccataagttttgccaaacccattcatttatatatagcattgaccttttggagagggatctagtgctcgaacgactattcatctcactgaggtaagcgtaaggtgtttttccaatgtaagacaaattttcaatttcgataaagataagaaggtcggacggacaaacgcgcgcacgcatgcatatatccctctatctatattccaagaaaaatcgtgtaatttaagatagtggggtagaaaggtttggggagggaaatggtggtgagattgagcaatattctttgataacagttcataaaggacatacaaatattccgtcaaaattaaaatcttacaactctttctcaaatttaattgatactgtcatgtcattccagaaagcggaaacgacgtatgactgggcgacgtttggcgggccgacgttcggtggggcgccatacctacgtttgtcgggatgacctttgtaggggcgacattcggtggggcgaggtttggcagggcaccattacgacgttcggcgggggaccttttgcggggcgacgttcggagggggccataacgactttct

SEQ ID NO: 4916 - DNA, 11526 bp, Mercenaria mercenaria
  source 1..11526: mol_type = other DNA
tcaagggtacaacagttttcgtccctacacgttcaacaaccagtggcgtcagagattcttcggtccaaggccaaccgatcaatgctttgcttgcagcaagttcggacactaccgttccaactgtccacacaatgtcttcaaccagaaggtcggcggagttccagcctttaccagaacattcctatgagaaactgaccaaaagaagcagtgaaactgtaacttcccagaatcctgtcatcacggacttgaaagttgagtataatttgaattttgttccattttatcagatttacaatgaacaaaaatcctattttgaattcaaagaaaatcagttttctccaaacatttccgtaaagaaacaaaattttgatttttgggagtccattggcgcaaatgattatgtaaaaagtgtaataaaaaacggtttcactattccttttatccacactcctgattcaatatgtcttaaaaacaacaaatccgcttcagtaaacatgccttttgtgttaaatgcagtttcggaattagtaaattcaggcaaagtattagaagatgccttttcaatcactagtagtaaattcccttacagtatctgttagtcgctcaggcaaaaaaggctaatcttagatttaaggcacgtcaataagtacctttggaaagaaaagatgcggtttgaggatattaagttaggtttagactacgtcgaaaaaggcggttacctgttaaatttgacttgacctcgggatatcaccatatagacatttccccagaacaccgaacatttttagggtaatgaaataaaatactacgtttttacagtgctcccgtttggtttaagttcctctggtttcatttttaccaaagttttgagagaacttgtaaaatattggcgtaaccgaggaatcaaaatcatcgtttacttagacgatggttggtcagttaattcttcattttatcagacttaagcggattctgattttgtgaggacttctttggataaatcccgtttcatggccaataatgaaaagtctgtttgggttcctgaacaatttaccaaaatgggatttgaaaaaaagtcgaattgaaatggatgttcgtgtgggaaaaaattgactgggaaaaagaccccccccccccctataaaatggggggtattttaatttagagtacgcttgttgctgcaaataaaccttgaacagcggtaatatacttcggatgtccagagatgaatgggatggttgaaagtttcaaccaaacataaaaagtaatatttgcataaattgacttatcgtaagtgtataaaaagcagtgtgttgtcttcattaaaatcaaacaacatgggttcagtttcctatcaacacggcgatattactagcataagaggtctggatgctatttgtcatcaggtgaactgtttgactgtaaaagctcatggcctttcatcacaaatagctaagaaatatccgtgggctgatatctatgcgaaaagaaaatcgatagggaatagaaatctagccacggtggaaacgagaggaacgccaggcgatgttgctatatacggagacagttcgggttttcacgttgtttgtttgttagcccagtgggaatacggcaaatgctttcgatctcgcagagaggaaatttcgccgtacaaagatacaccagagaaaaggtcggaatggttcaaggaatgcttggacaaactaggaaaacgcgatgacatacaaacgattgcctttccagaaaatattggatgcggaattggaaaatctacttagagcacattaaaaacttaacaaaagattacaataaaacagtgatcatattaaagtatgaaaactgaatgcatgagacccgccttactgacatttccgaggcgacgcccatagtgttcatttctttcaggagaagtttggcatgccacagggcgaccagatttatattgtttatgtatagaagacatgtatttgttgaattactattaactgtatttagcactgagtaataaacatgaaatataatgaatgtttctagtaacactatccctaaaacaagtcagaaaagccgttgtatgttctcagatattaatacacagtcagagcgatgccagtttcgacgcaaaactgtgtactatatcaacaatgaattatcctttgtcgcaatgaacaattaccacttacacttttatatcagaaagggtaatgcttgatctatctctgaaacactagcagtaacacaagaactgcttctattctgatttacaaataaaacctagaggtgcaccgatagtcaacattgcgcacaattttgacgcgaaacagcccatttgaataatagtaccatgagacatcttctattttgtatgctaaaggcgtaagtaatgtacctgtaacactttaccgacaataaaacagactattttctgaaaacatgcattttttgctgccaaacacagttgcattctgatctaaagcgttgtgcacatttgtgatacaaaacagcttatttcaataactgcacaggttcaaacattctgtaaaatacaccaggcattgttgatttagtgtgtgcaaggcctttagcaccataaaaacagtaaaacagagaaattttgaacacttaaaataactgtttactttaatatataactatttaacagacaagcttaaagctttttcaatgtgccttataaggcttaacaatctaatttgactggatctaatttaagtctcttaatgggtgtcttttgtgcttcatccatgacttcttgcatcaatcttatcaatggggacatttcctttaaatgacatagaacgagtaaagaatattagaacatcaatccgttatgtaacgaaggaagatccaacatccataattgttggctttgacaaaggacttggctcagctagatataaagcacacatatatgcacaggaccataccatagtcaattgggggcatgctctacctgctactatagctgcatcagacaggaaaatctttgaaggctatgtactggaatttaatgaactgaaaactagagatgaaatgaaagcaaagtataaaggatgtgtgttaaacagttggcaagaggaattacttcctttactacaggacaacataggaaacgacagacagatcttttggatccacgataaagatggaaattcgggcaagacctggtttgggaaatcctgcaagcagaacaccaggctataatgtttaccaacaccattgaacgtgacatcttctttgcgtatcagaaacaatcaatagtggtatttgatgtagcaagacaaaccaagacagagaatgtgaactttgagtgcatggaacatttgaagagtggttctatcttctcaaacaagtacgagtctaaagtcaagacggcgatatatgacctttttgtgtcgattcgccgtaaaacccaactcattcattcattcattaaagtcaagaacttcaaacctactgccatactatgcttgtccaatgccttacctaagaaggagaaccttacccttgacagatggagggtattacaaataatagagaaaacaagactgcatcgagtgaactgctttaatgagcctgggtactgtttcgaccctttctgcatgtgcaacaacaagttcaataagttaacatgaacagttatgaacaatgatgaacagttaaactagttaatacataggccatcacgaggcgttacaagcttggtaaagtaggaatctccccgtctagtgacaggatctggtcttttgatgtccgctaagattgctagatcgggtatacaaaccagctctgtatgccaaagggtgcctacttatgacaagcttacaacgccatcctagtaaaaaaaacttaatttttaagcccgactctggtgtatgttatgtcgaaatttcgaaactttggcaaacacaaatctctttatcttttcaaacaatcaaaattaaaaactctaatggaccgaacggcaaccgaaagttctcattcagattgacttttcatagatcagcgcgggtggcttcggcccgactccgcacttggtaggcaatgtagccggtgcggggaatttgtttgcccgtcattgcaatgattgtctgcaagatataacatgccagtgccacgttcattggaagggcgacgcttctctattgagacgcccgcatacacctttgaatagccttgtcgttcaggcgttgcggcaagtatcggggactggcatgacaatgtcttgttgagatactgatcttgtcaatttgaaagtgactttggcttctacagctactttcttctatcatttggtactctatcccaaatttctttcaatgctaccttgtttcgaggccctgtgatcaagagtttctctgatgtcacagtggtctcgaaacatgccagtgacaagtctggacaaacgcagagtcgaagaaatttggtatacatttttctaagtgtgatattgcaatgctgaacgaatacgtcggctcacacctcaggccgatgtctgattagcttactgttgaaaaaccaaatgttaattcatgcttgtaatttggacacgatatttttacatgctaaagacccttgatgcctagtttagaccatctattttgctttgaaattgacacaaacttaaaaacaaagaaactgcttttttaggtgattagcaaactggcttgtttttcttaccacgacagaaattggtataacacatacaaggcccataatttatgcaacgttttctccagtatgccttaacatttgtctataatacaactcaaggcatgatcatttctgtaattaaagagttaaatcacaaggattcgtaacagcattctcgtacacttgtgcagaaaaacaggtgaatatgctaagatgctaaggctaaaatactagaaacacgcaacgaagaccaaaatataatatttgtgataagtgtctcgtaaatggcataaaagctgccagctgcatgcattcagattaaacaacgactatgaatcgcaagagaagcctctcacctctaacactttggaaagcggcacatgtgttcaagcaccaaaacctggagtgttgggtaaaatttgcgaaagatgaagaagcgcacaacaaggtgtttgcgtctgatttcgaacgtacttgtaaggaagcaagcgaaacttgaagacgaaaaaccattcctaacgaattttagagttggaatacgtccaacacgaaatcagaaaaaagtgctgaacgcgatgttaagagtgagcaatcacgcttacaacaggtgcaactatctcgtttgtgaaaatatctgaagcctaaagagtatgacttgcagaagtatgtgagtaagactaattccagtgacgttccaacagatttcagaatgaacaacaacgacgactggtatttcaataacaagatgacaaagatcaaagacgcagcgtgtaaagatttctgtaccatgtacaagtagacattaacgaaccaaaggaagaagaagaagtacatcaagaccgtgagtcttaaagacaaggacgatatgaatccaagtcatggagcgtttgagattcagaaggcgctaattcgtaaattgaaggagacggacagtgacgattatgatatccttaacaactgtttatcagtcatggctgacaattttacgatgcgaaggaaggatgtaagaaatggattcctgcgcttgtctaaaccagtgagcaaactgccacctttagaacatgccgttaagatcgtcaaggcagcgaaaggaaagttcttcttacatataccatgcgatccaacttacacgaggagcaaacggtacgacgaaccatttgattctatgtgtggcatcgatcctggcggaagaacgttcttgacaatatacgatccatcaaagccacggacatttcaaattgcatctcgatgtaaagcgccatctaagccagttcgtaaacggacaaagaaaaagggggtaaaaatggcataggaaaaagaaaagtcagcgccgggtcgggagcaccatagacaagattgacagtctgcacgcaaaaaaagactatgttaattcaaaaatgcaagcagccatacggcgaaagcagccccaagcaaaagaagatcggcaaagacaattacaaaaggtgtattatcaactaggaaatgttatcagatgggtacatcttcgttgtacatacaatctgatgcaatactcgtacgtagccattggagagataggcatcattcgaaggcaatgtattggaaaacgaagacgtatcaacaaaaatccgtacgtcatctgacagtgtggaatcattgcaagtttcgtgaaaggctcgtgtatagggccaaaggcacaaagaccaatgttatcgttcaagatgaaagctatacgtccaaaacatgcagtgaatgtggaacaataaacagcaaattaggaggcagcgaaacattcaagtgcacaaatccaagctgcgattacattacaaacagagacgtgaatggtgctaaaaacattcttaggaagtctctcggtatcggctcaattaaaacgtaccgtgcatgattttgaactttggaacgtttaatcggttgactcgccgaattccagctgaaccttatagggaaagcattggtgaataaaaaagggttagggtgttgcggcaaaataaaactgttgtagagattatggttattgtttacgtatgttaaatatcataaccagtaaaaaaaccaaagcaattatttaccatcatgataagacaagaaggaatagcatctgtcaatactttagtctgttactctcattttcacacacgattttactttggccatgcaaaagaagcactttcccttagccttatgtgaacagtctttgcaaaaggtgtgtccgcaaggtactagtgtgtgatctttctcggctgacagacatattatgcataataacagttcgtcccttgcctcttgcttagctttagacagttctctctgatgagccaccagcatctcattttccctcttttcccacgccgtttccgacaatgtactgcttgtgctgcttgcacttgtaacagttgatgtaggccttgagtacggtttcagcctatgcagtcctttgatgccttttacgggactttttgatttcaaagtacacgtaggcgttctcattaaagtcggaccaaatatatctggtagatcatcaaaatcatcttcttcttcatcactatctattgcgataatatctgtcggaagcaactgtctctttgctctgtcactattgtctgaaacagagaagaacaaaaaaggaatttaaaaatgttacatggttatttcaaaaaagtcaatcactattagctaaaacaaaacaagtacaaatatctagttcaatttgaaagtgtcaactcaccaatttcatccatcagcaagccttcggctctccaagagaaacctcgcagccgatatgatgtccggcatatctttgtcattcgttccctctctgaactcgttttcccacaagttcagtttggatagcgccgacatgctactcttgaacaaggaaggatctcgtccgcgatccaagttgatgcaagtaatgacgttatcgatgttttcgatcaagttctgagctcttctaatgaggcctcttcgtttgtatacaacaaatgtttccattgcttgttgacggctcttcgtcatgaatgagctaagtaaatttgcggctgctctgttcatctttctggtacagaatgagagtttaaaccatccgcgcacgccatatctagctcaaaatgttttgaccaatcagaatgtggcatttaaaccacgcctactttgtattgaccaatcagaaagcagattgattgaaaaaagttattttttggtgcagtaccgaggaaatcgacacttgagcttcattctgtggaatgttatcataccgtaaacacgcatacaaacaactcatcgattctacaagatgcttgcgaatatcatcagcatcgaaacactgagacagaggtctgaaactctggacatgctgttatcacatcacaacgatgacatgtacgacaagacagaaaagacactgttgctcagtgaatgccacgagagatacattgaggaacaaatgtatggcttcctccaagaatatgacacgggaattttacatatgctttttctggcggacttgtcagatccggcaatgaacttcgaaatcattgtatcaacgtatgatacccgattgctaatggtattactggactactatgctgttcaatcttggagaagtgaattccttaactttatgttaaatagcgagaaggtgtactggctagtgtgcaatgggctgttcatgttctcagttgttgattatggaataacagacaggttcatcagagacgttgattgtaaaaacattacagacctatgccaccgttcgtgtttcatcaaacactacgaagaaatgcgaccagttttagagaaatttatgcagcaattggcatgtctaaccgtaataaaagtacatcaacgtgaatatttgacttgttgtattttaacgaacaagactgattgtcacagtaatttgctcaatgctgatcagtcagtagccttaagtttgtaaaacagccaaaccctagccctgacctttaataacttttcctagccatacacctgggaccagacaccagcaaagacgatttcgttttggatttttaatatggctaggtcatttctttgatcttaaaacaggggttttaaaaattaccaaagaacgagttgataatctaaaacgggcgatttcggttgcaaaatcccaaaaatgtgtcccagtacgccacctagcgaaaataacaggtttgatagcctcaatgcattttgtcctagggcaacttgtccgcctaatgaccaggttcttgtatgcaagggtaatgagcagtagtcactgggattcttgtagtattttagaaggaagtcaagaattgactgaattatctttctgggcagacaatattgattttctgaacgaaaaacaattgtttcctgtctcttcggcacaaggagcattttctgtattttcagacgtaagtgatgttgcatgtgcagcatattctcctagttttgctggctgcatttcgcacaaaacatggtcagatgttgaaaaattaaaaagttctacctggcgagaattaaattgcattaaattgtatccgggctttgtcacacttcttaacgaacaagagtgttcagtggtttacagacaataaaaactgcgaagttatcgttcaagccggaagttccaaacaagatttacattctttagccttaaacattttcaatttttgctctcagaacagaataaatttgtctgtgttatggatcccccggacagagaatgatctcgcggacttttattctcgtcttattgacgaagatgattggtgcgtttcagatgatttctttaatttcataaattcgttatggggaccgtttactatagacagactcgcaaatactaacaaccgaaaaattgttaggtttaattctaagttttggaacccaggaagtgacgcgattgacgccttatctcaaaactgggccggggaaaacaactggctagttccccccgtatgcttagcatgcaaatgcatcttacatttaattcattgtcaagcagtcggcacgttgatagtgccgaaatggccttcagccgctttctggcctttgatttttgcagacgaggcgtacacgtggaggggttatgtgttagatgcgttagaattcaaaaattcagaaataatcgtcccgggaaacaataaaaactctcttttcggatccggccgtttcaatggatccgttttagctgtcagattagacgcacgtgtttaaacacataaatataccgcttgggtttttttttgttctatttttaacatagtattttctataaatacagatattgtccgtaagtattgacctggcactcatgaatattccgtatgtttccgtaaattaattttcggtttccgaacccaaacaacgatataactattgaaaagccgtcaagtatcatgtgcagatacagctgtgtggacaaagcgttttgccagtaaactcagggttgagtgttcgagccctctgtctgcccatttttttatctgtaaaagacggaaacttgtcacactgatcatgatttatcaacgaaatactctactgttgattaccgttcttctacatacataaaacagttataaaaaatgtcgtttaaaatcttcaggacctgacaagcattcattcattcaacggacaattcaaggaatttttgttagcgacacaaaatgcaatgtttcaagaaaaatatataatcatagattcaaatacaaacacaaggaatcatatttcgaaaaatggttagaaaagaattcgaacccatagtaacgtgtttccaagtcggagagcttaccactacaccactgtgccgttggttctctaaattgattattttgataaatctagatattttcaggacacgaatatcacgtaaaataacgaaaacgcccgaaaatattggcgaagattaatgagtgccaggtcaatacttacggacaataacgcatgagtttttcaaatagcgggttatttatagcctataggtggttttacacagcacgcttttttgtttgacttcagtaagttgttattaaagccatagtgtgcacaatgattcatgcatatggtgctagattattaaaattacttacctgaatccaaggacctgctgaaaaaaaagtaagccattgtaaagatgatgattatagagacatggaaaagatgagttacagaaaagaaaagatgagatatagaaaagatgagaaatagaaaagaaaagatgagatatagaaaagaaaagatgaaatatagaaaagatgatgattatagaaatatagaaaaaatgaagatatagaaaagataagatataaaaaaagatatatagaaaagagtagatatagaaaagatgagatacagaaaagatgagatgaagaaaagatgagattatagagatatataaaaagatgattatagagatatacaaaatagtacaggcataggtataatgccatgtgatatatacataaaaaaaaaaaaaaaaaaaaaaaaaaaaaaaaaaaaacacgaaagcaggtcattggagtcagttttattattattttccaagaaatcctattttaatcagttattttacttttttcagatgttttcaaatttggtatttggacagatctccaacatttaaacgaagaaaatccgaatcttaaacacctggcaaatatttaacctgatacagtgttacaaagcaaatctgataataccagaaaacaatatgcatgttattttaaaaaatggatttcatggtgcagtcaaatgaacattaccaaagtatttccagcattagaatttcatattgctttgtatttggtctcattaattccgaaagagagctccatttcagtcatagaacatagtttctacccgttgaagtgggca

SEQ ID NO: 4917 - DNA, 11512 bp, Mercenaria mercenaria
  variation 3038..3137: note = n is a, c, g, or t
  source 1..11512: mol_type = other DNA
taacactgctgaggaaagtctgtctcacacaacttcagtatgcttgtaaaacttgaacaccttggcctgtacaaatcacatcacagtgctctaaaaacaagaagcaaaatatcaatctatcagtgctttttgataattcattctgtcaaagtgcttattcattttcacacatataaaatgagacaaaattcggtctagaaatatttccattatgtactagtgaacatttcagaaagcttggcttgttcaacagttcaaatgacaatcaacagtaatggatggaaaacatgcatttagtgactctaaaacactaaaataattcatattcaatcggtcaatatgcatatttattatttcaaacaaaaaatcattgaaaaaaaggtctagaaattccaccttgcggcatgccaaaacttatttcaaatgtcatcaattcatctagctttagctggctgcccttttcaattttgctacagcgtgatgaaacaatcgacctacattagcatacatatttaagctcctgtaattgccatccgactccatctttggtacgtttcaatggaagacattctgagatgtaatttctcataaacatttccctccttctgcaaacacaagaatacggttttctttcacagaaatactttcgcgcactggaacctatgtctcacgctccttgctgaaagaaacaaagacaaatatcaaacagggaatgccacgtaccaaaaacgcagcctccacaaaacgaaacccacatcacgtagacgtgcacatacacacacacacacacacacacaaagagagagagagagagagagagagagagaaagaaagagagagagagagagaaaatcgggtttccagaaaaagacgagaaatggtggatgacagggccacttcaaatcaatgtattgaatttattcccgatcgtagaaattagcctcattaaatagcctagaaatttgttcttgttgtatcaaattatcagcttcatatcgtgttcacttcatgcaaaattaccacccaaacatgcacctttgttgtaacggcgcggccattttgttgtttagagaggactgtcattttttagcacaaaatcacgtccttccctagttttgttaattgtgacaaattaaccatacaaaaagaacaggtttgcctacagaatgacataaatcatatattttaacagttttgtaaattatcgcaaatgtacatcaaaacaaaaatggtttaactatcaaatgagaccaacaacacgaatttctattgagaatttgaataagataataacgtttcaaaatcacttatcttccctcgcatttcacatgaatttggacaatgttcattgtagaaaatatacataaccaaatgttccagaataaaaactttgcatgcatttattgcaaaaagagaactggctttcttgtcctaaaagaggtatttttttccatccatgcgttagcagaatataacatagaaattgcatcatttctgcacacatgccattgcgtaaaatagtcaaaataaagtgtttatttctactacaaacttatcaaactataactagtggtattcactaccacaaaatacacttaccttttcatttagataattcaaaatcctttaaataattcgacaatattccaaacaacaagagaactttttactttcattttgttcaatgcacagttttgactgcactgtctgtacgttcgtcacggcggattgattctgaacggcatagttctttcgcagactgctctaaatactgtcattattgtgtttaatgtctcgcacgcactaaatcaacgaagccttctgtaattttacataattttaaacatgtgcatttattgaaataatgtgttttacatcacaaacgtgcacaacgctttagatcagaatgcaacagtatttatttatttatttatttgggttttacgaagcaacaacacagtataggttatatggcgccaaacaggactacaaattttgtttccacatctcatttacatcgaaataaaaacatgaggtatggaatcaaaacttgcatacctgctggaatcacagagttacagcaaaactaaatgttaagaccatattagtcgcctcttacgatcatgcaagggtaaggctgtagttccaattcttttcatacacagatcgtcccagaaccacatggggccagaatgcaacagtgtttggctgcgaaagtgcgtgcttcaaagtatattcagagaatattctgttttatcgacagtcaagtgtttgtttacgccttgtacatacttaatcaaaaatgtctcatgtaactgataaagctctatgaattgtttgtaaatcagaatagaggcagttcttgtattaaattttgtgttacaaagacagatataacatttcttgtttgaattaaatgttccaattgtaatggtcattgttacaaaggaaaactcattgttgataatgtacaaagttgtgcgtcgaaacggacatcgctgccactgtattaaagtctaaaaacttcttatttatgctttctggatagtgttgccagaaacaagcattccttatgtgtttgtttagtaccaaatgctgaatgttgaatgcaattgatatcagttttctatggaagtgcatcgtttagcgtcaaaattgagcacaatgttgaatatctatgttctgtaacatcccccgtccgtatcgaggctctccaacaaaggaatttggtataaatcctgtacaatttaaaatccaatatatttgtgaataacataccctatgtgcacacactatgttatatcgattttacacgctttgttgctcgctataaataactatgtcgtatagttcattttgaactgttctatttttagcgctagtatttatctgtttataggcagtgctattacaatttactttatactgtctgcttttaaatgcctttctttaaagactgcagttcgttaaagatgtattttgtataccatgttttgcgacagtctctttatgtttgttctgatcggcatggtgtagcnnnnnnnnnnnnnnnnnnnnnnnnnnnnnnnnnnnnnnnnnnnnnnnnnnnnnnnnnnnnnnnnnnnnnnnnnnnnnnnnnnnnnnnnnnnnnnnnnnnnacatagatgcaaatatgtacatacatcaatctccatacgggatatacgtccatctctcactctcttatcaaacacaatcctatgttattttttcttttgcgtcatcgctaaaagtctagctcgattaaggtctcgacctatttttgagaatctgtcaccgttacgactcggcttggtgggcctataatcatgtccttaatggcttcacaattgattgacatccgatttttaaaattttcagagtgataatttttattttacagcgagtttattcatttaagatctcaatgtgtttataccattttaggtcatatatagcttatttttcatccatttgtaagcacgttggttaatttttataacatccaaatgtatatttgacgattaattatgtcacccgccacccgccaacgccaaacgccacctccactaccaacaccaccaccaccaccaccgccaaccgctaccaccacggataagaaatgaaaccctactcacttaaaacttcccagtcagactttcagcgctttgatactacccatacagactttctccgctttgatacaaccaatacagactttcagcgcttttatactacccatacagactatcagcgctttgatacaatcaatacagactttcagcgctttgataacagcaatacagactttcagagcttttatataacccatatagtctttcagcgctttcatactacccataaaggctttctaagctttgatacaacccgtacagactttcagcgctttgattatcggaaactgccgaatttcgacgataaagtatcataaataaagtcaagacttttaacgatgacgcaaaagaaaaaaaaaacataggattgtatttgataagagtgtgagagatgaacgtatcagagtggtatcgtttcttatattttcattattcacaatatttaaaatggaggtcaaacatcgagtcccaccccgaaaaatgactgcaccaaatttacgtcattgagtcaaaccacgaaaattgactcctgccaattcaagatggcggttttatatagacaaagaaggggaaatgtgatctagagtgcgatcctctactactttcaacattgtgctcaattttgaagcaaaactataaaaatctgatatcagttgcattcaacattcagcattggataataaacaaacacataaggaatgcttggatctgtccttgtaacacattttttttacaagatctgcttctattcttatttacaaacaaatcatagaggtgcacagatagtcaacattgcgcacaattttaacgcgaaacaacctatttcagtaacattacacgttcaaatatttatcagttacatgagacacctttgattacgtatgtacaaggcgaaaacaaacacttgactgtcgataaaactgaatattctctgaaacatgcacttttgcagccaaacactgttgcattttgatctgaagcgttgtgcgtttgtgatgcaaaacaccttatttcaataaatgcacatattttaaaattttgtaaaactacacaaggctttgttgatttagtgtgtgcaagacatttaaacaccataatgacagtatttagagcagtctgcgaaacaactattactttcagaatcaaggcaacgcgtccaacgtagtctcaactgtgcattgaacaaaatgaaagttaaatgttctctcggtgttttggatcataatcaaattgtttaaaggatttggaattatcaaaatcaaaaggcaagtgtgttttatggtagcaaataccactagttttagtttgataagtttctagtggaaataaacactttatgtgtgcagaaatgacgcaatttctgtaaaactcaagagaagccttactgctctaacactttggaaagcggcacatgtgttcaagctcccaaacctggaatgttgggtacaattcgtgaaagatgaagaatcgtacaacaaagtgtctgcatctgattcgaacgaacaaagaagcaagcgtaactggaagatgaaaaaaacatttttgacgactttcagtgtcggaatacgtctgactcgaaatcagaaaagagtgcttaacaaaatgcttagagtgagcaatcacgcttacaactgaagcaactctctcgttcgtgaaaagaacatcaaaccaagacagtacgacttgcagacttacgtttgcaagaccaattctagttgcgttccagataattttagaatacacaccaatgtcgactggtattttgataacaagatgacacatattatagtagcagcgtgcacgaattcctgtcccatgtacaagttggcattaacgaatcaaaagaacaagtgcatcaaaaccgtgagtctttaagacacggacgatgtcaatccaaggcaaggtgcatttgagatccaaaacacattaattcgtgcattgaaggaggcggacagtgacgataaaaacaatttacaccattgttttgcagccattgctgacaattttactacgcgaaggaaggaaacaaggaatcgaatccggcgcttgactaaaccagtaagcaaactgccacctttggaacacgccgtaaagatcctcaacacggcgaaaggaaagatcgttttacacattccgtgtgatccaaaattcacgaggagcaaactgtacgacgaaccattcaatactatgtgtggcattgatcctggtggaagagcctacttgacaaagccgcaagcattcaaaaatagatctcgatgtaaagagccaactaagacagtttgtaaacgaaccaagaagaatgaaaaggtctggcatagcaaaaagaaacgtcagtgccgcgtcaggaacatcatagacaagattgatggtcttcacgcaaagaccgactatgttaattcaaaaaatgcaagcagccatacggcgaaagcagcctcatgcaaaggcggatcggcaaagacaattacagaatgtatattatcagcaaggtaatgctatcagatgggtgcattttcgttgcaaatctcttctgatgcaatactcatacatagcaattggaaatatcggcatacctagtatcattcgtaggcaaagtaaaggaaaaggaaaacgcatcaacaaaaagtcgatacgtcatctgacagtacggaggcattgcaagtttcgtgaaaggctcttgtatcgagctaaaggaacaaagacaaacgctatcgttcaagaggaaagttatacgtctaaatcatgcagtgaaaactataacgacaaattaggaggcagcgaaacgttcagttgcacaaatcctacctgcgattatattacaaacacacacgttaacggtgcgaagaacattcttaggaagtcgcttggtactggctcagttgcaacctaccatgcgtgtttcttaactctggtacgttacgtcggtgactcgccgaattccagctgaaccatttggggaagcattactaataaaaagggccatactacataatgtttgaactaattatgtcctgctaaattcctatcagtagaataaaactatttgattcttctccttatgcgttgaattatgttgaacattaagtcctactgttgaataaaaaacctatggaaagcatgtttggtcagaaagcatcggtagggcctccgtggccgagtggttaaggtcgctgacttcaaatcacttgcccctcatcgatgtgggttcgagtctcactcggggcgttgaattcttcatgtcaggaagccatccagctggcttacggaaggtcggtggttctacccgggtgcccgctcgtgatgaaataatgcacggaggggcacctggggtcttcctccaccattaaagctggaatgtcgccgtatgacctatcatgtgtcggtgcgacgttaaatccaatagaaaaagaaaagaaagcatcggtgactgtttattattctatccaatgtgggagagataaatctgcttaagctgtccacattcacagttttgcattttaactcattttggcatttcaagtgtttctaacattctttgggacctaagtctttgccagatcaagccatttcatgttttcacacatctagcgagagcactgcaaaagcacgtccgctctcttcggctgcacaattagtcaagtgacctgttacaacttgagaaaaaatgctcgtcgctgattggtcagttaatttcagtggagactcgtcatctgatgtgaaactacgttgaaaggcattagccagtctgaacgttttgtgacctcacgggtttgttatttattaacaggcctataaaagcagctgcacaaactcagttgttcagtttgtctgctttcaccttgagaatttcaaggtgtttccgcgtcagtttatgttagatatttcttttatgtatggattaaattcgtggtaacaagagtacaagacagaaaaaaatgcctggggtgagtacttggcaaagtcgcgtcgctctcgaaatgcacatgttaggatttggataggacaaataagactggcaacgtacagaagcatcgcgatgccaagtcttggttcggctagaacttgatacggggtttcgatcaattgagaatgaccggtgtttggcgtagttgggttagggcgaggaagtctcgatataccgtgttaagatactgtgatatgctagataagtcttagatccttattgtgaagacaagttttgcacaacatatcttagatattgaatgtatttctctcttcacaggacttggctactatattcattggtagtggtgtatgacaaggggcgttttcatatccttacttgtttagtttttatttaggaaaacgactcttggattgctctcgctacaaaatgatgtttgtttaatcatatcttattgctctctgtttcaatattacacacaatattacgtacatttttaacacacaacaaaacacaaaagggttgggctacgagttatttcaatatcagcatacagcccttccaaaatgatgaagtaagtgacatcaaaattttagaactcttacttctaattacaagatcaaagtttaaaattcaatgtgccatctagtatacagcttatttgacacgtaacagctgtacacaacacgatgcaaccttttctcatttctcttgctctcttcataaaactaaaattactaatgctaatggactacatggcagcagatattgcttgggttggactgaagtttaggggaaagaacagctagaagtatggaggtttcgttagaccagctttatgctatagtgaggtgaggccatcacgagacattatgtgcttggaaaagtaggaatctccccgtttagtgacagcatctggtctttttatgtccgctattgattactaaacagagtatgcaaaccagctctgtataccaaagggttcccacttacgacaaagcttgaagcgtcatccgagtacaaaaacaaaaacgcccgactctggtgtaagtgacttcgaaatttcaatactttggcaaacacaatctctttcccttttcataaaaactaaaaacattaatggaccaaaaggcaaccgatattttttttcaacttgactttcatagatcggcgtgggtaaactgccaacgcccgattctgcacttgctaggcgacgaaaacggtgtgggaattagttttcccgtcatcgcgatgattgtccgacaagatataacataacaaaaccacgttcctaggaagaacaatgcttctcaactgagatgttcgctactaccttcgaacagccttgtcgcccaagcattgcggcaagtatcggggacttgcatgaaaatgtcttctggagatactggtcaatttgaaagtgactttggcttctacttctactcactgtctcttctatcattgggcacactatcaaaaacgtcttctaatgcgaccatgtttcgaggccttgtgatctagagtttctatgcaaacacatttggattctcagatgacagtggtcttgaaacatgccagtgacaagtctggacaaacgcagtgtcgaggaaattcggaactgctcatttatgacttgtagctctcttgtctcatatgttgcagttaatgttttcgaacagataatacaatgtcgaaggaatacgtcggctcttacttctagccggtgtctctctagcttactactttattgaaatacgaaatgtcccttcatgctggtaatttatttgaacacgacagttttacataccgaagggcgtagatgctggcataaggccaacaatttcattatagactcgatttagttgtaaaacaaagcaatgatcacttttgaaagtattcatgtaaaagtctcgtcttgtattcttgatgaaacagcgactatgtataaacaagttctatggtttaagcatacaaatatccagcatgaactgataattgcagtttttcatactgtatgttttcactagttactgaagagtaaaatcacagggtttgtttgctaaatgctcgtatactgttaatgaaagtggatgaacacatttgtgttttgagccgatggtcaattgtcaactcttgtgtcaaatgcatgagtcaccaggttgagttcataagtgtatcaggttgtatactcaaagtcattaagctatgtactggtgttcagaagtttagaagaaagatactgaagtattgatttgttttattgatttgcctattagaaatgaattgttcgttcttagtttgtatcataataagtgttgggacttgtggccgaacataagaccaataagaccaataaacaaaacgaagcagagtattgtgttagcattgcattatcatcataatatgtcaatagaaataacatcagtcagtacttcagtcaataagtctcattctcacactagatcctacttttttcatgcaaaagaaaaaactgccctttgctttagtcttttcggcacagtctttacaaaagatgtgtccacaaggcacaaatgtgtgttctttttgagctgactaacagattattcacaacagcagtacattccttccttccttttagattcaaaaattctctttgatggataactaaaagttcattttcccttttctcccagtctatttcggaaaatgtatgacacgaagtgccactgctggtgaaggcggtttgcttgacttgtctttttaattcatatgagacactacatgtgacttgaacgaacgccaaatcttgttcaattgagacacttcatacctgttcgttctttttacaataagagaagatgacgtgcttgcttgactataagacactacatgtgatctaaacgatcttgttcaattgagacattccatgcctatccgttctaagatgatgtgattggttgcctgagtcacttaatgtgctctgaacgagcgtccgatcttgtacaattgtgacacttcctgctaagatgaagtgcttgcttgactgagacacttcattcgctttgaacgaaagtccgatgttgtgcaatggtatcattaagacatttcaagcctgtttgtactttttataattagagaaggttatatgcttacttgactataagatacttcatgtgatttgaacgaacgtcctatcttgttcatttgagacaattcatgttctgttcgttacaattagagtatatagtaattaaactgtactgtccagctatataaaaatgcaaaatcaactccatgaatttcctattctgtctactcaatatggtttatataggctatggggagacaactcttagttaggaaaattgtagaatagtgtgtctgacctaggtttaagatgtggacatcgcatgtagcaggccattagtcaatttacagttaagaggacaacatatataaattgcatgagagagatttgcttgagatatatgagtcactaaatatgatatgaaagaacgttctatcttgtacaattgagacacttcctgccatgtgcttgcttgactgagataagtgagacactacatgtgctttgaacaaaattccgacctatcttgttcaatggtgtccttcagatacttcatgcctgttcgttctttttacaattaaagatgatgtgcttgcttgactatgagacactacaagtgatttgaaccaacacaattgagatacttcatgcctgttcgttctaagatgatgtgtttgcattgtatattgatatgaatcactcaatttgatttgaacgaacgtccgatcttgtttaattgagacacttcgtgcctgtttattctaagatgatgtgcttgcttgactgagatatatgagacactacataagctttgaatgaactttccgatctatcttgttaaatggtgtcattgagacactttatgcttagatgatgtgcttccttgac

SEQ ID NO: 4918 - protein, 258 aa, Mercenaria mercenaria
MNRAAADLLSSLMTESRRQAMETFVLYKRRGIVRRAQDLIENIDNVVTCVNMDRGRYPSLFKSSMSALSKLNLWENEIREATNETDMSDVIAAARFLLENQGLLTDELDNMDKAKKQITLTDTIVISDEDNDELPDIISPTMSTKSKSPIRGIRGLHKLKPYTRPSSTVTSSTLTETAWEKTENELLLAHRRELPEAKQEARDELMQCVICLSAQKDHTLVPCGHTFCEYCVGQIKASGKCCFCNAKIKSSVVVRLTD

SEQ ID NO: 4919 - DNA, 11465 bp, Mercenaria mercenaria
  source 1..11465: mol_type = other DNA
ctccaccaggttcgctgtttctttaccatgccatacgttactattattacaatgttagaaattgtactttaaggagcggggatttcacgactgctggctttaaagttagacttgatacctctgaatgcaagggaaaatactcttacatgataaaacatatatccaaaacgcattcataacagttgtattctcactttgtttacatatatttatttttttctcacgatgttaccactggtagcaatacaactattttgcaatgaactaaataagccagaagtcattttaaaccagaaatttgcagacccggcaatgtaatatgtattccaaagtgaaatcggcttttggggtgtctggtccttggtgtatggctaggaaaaagtaggtgaggttagggttagggctttgagcatttttgaaagttgaatggcgtgttgtttttacacagtatgagggttactggctgcacagcattgggcaaattactgtgagaatcggtcttgtccgttgacataacatatcatagcataacataacaaacacatgttcagatttgattcaattttattgcattcatagttcagttacgcgtgccaattgctttataaatgtctccgaaacatgttgcgtttcttctaggcgtttcgatgaacttgaatggtggcataggcctgtaatgtttcttatgatcgacttctctcatgaacctgtccgttatcccattatcgacaaacgatagtagaaacgttgcattagccacaatccaatatacccgttcattcctcgcgacaaaggttttgagttcatctctccacaattgtatgtcataatagtctatcacaagtatcaagaatctagtatcatatttcgacaaagctgtctcatatgtcacttcaggattcgataagtccctaacgaacagcacatgtagatgttcgatgtcgtcttctgtaagaaatccatacagttgttcttccaaataactctgatgacatctgccgagcaacaatgtttgctctttctcgttgtacttcttattttcgtcatcttcgtttcttaatagcatatccagagttcgagatctctgtctcagtgtttcaatgctaataatgttcactttcatctcgccaaattgttgagaaaaattattttgcatcttgacagtttgagagctgaagatataatgaagctcaagtgccgatttcctcgatactgtaccgaaaaataacttttttcaatctatctgctttctgattggtcaattcaaagtaggcgtggttaaaatgtcacattctgattggtcaaaacatttttagctagatatggtgtgcgcggatggtttcaactctcattctgtatcagaaagatgaacagagctgccgcagatttactgagctcactcatgacagagagccgtagacaggcaatggaaacatttgtcttatacaagcgaagaggcatagtgagaagagctcaagacttaatcgaaaacatagataacgtggtaacttgcgtcaacatggatcgcggacgatacccttccttattcaagagtagcatgtcggcactatcgaaactgaacttgtgggaaaacgaaatcagagaggcgacgaacgaaacagatatgtcggacgtaatagctgctgcgagatttctcctggagaatcaaggcttgttgacggatgaacttggtgagttgatactttgagatttgacagtttgaatttgaaattgaactcgatacttttactagctaatactgacttgttgaatagaccttgtaacaacttttgtaaaacaactgacgttcgtttatgttttctgtttcagacaatatggacaaagcgaagaaacagatcacactaacagacaccatcgtcataagcgatgaggacaatgacgagttgccagacatcatcagtccgaccatgagtacgaaatcaaaaagtccgataagaggcatcagaggattacacaagctaaaaccttatacgaggccctcatcaacggttaccagcagtacgttgaccgaaacggcttgggaaaagacagaaaatgagctactgctggctcatcggagagaattgcccgaagccaagcaagaggcaagggacgaactgatgcagtgcgtcatatgcttgtccgcacaaaaagatcatacactggtgccttgcggtcacacattttgtgaatattgcgtaggtcagataaaagcaagtggcaagtgctgcttttgcaatgcaaagataaaatcgagtgtagtagtgagactgacagactaaagtattagctgatgttattcttttacctcagtatgatgacaataaaataaaacctactctgctttgttttttctacatctgaattcaggtttaaccactagtccctaaacttatcatgatactatggctatatctatacatcaatatccttaatctaaactaacgtaatcagtaaccaatgcttggacaccaggacagttcaaaatacatacagatgcgaattcaaactggagactaataattttgatatcaaagtagacaattgccgatcagcttgaaacacaaatgtgttcaacaactttcgttaacaatactttagcatacagacaaaagtccctatgatttctctttttagtgtctaatgaaaacacaccttatgaaaaaccaactgtaattatgagttaatgttagatatttgtatgctttaaccaaaggactcgtttgtacaaagtcgctgttttgtcaatagtaatagacgagccttttacacgaataccttcaaaaatgatcattgcttttgccttaccagtaattcaagtctattatgaaatggttggtcttaattaggcatctatgctcttcggcatgtgaaaatatagtgtccgattctccagtatgaattgacatttcgtttttcaatcataagctaatcagacatcggcctgaggtaggagtcgacgtattcgttcggcatcgcaatatcacctttagaaaaatgtacagtaccaaatttctgtggctctgcatttaacgggcttgccaccgtcatgtttccaagtatcaccatctgagaattcaatgtagttgcttaataaatgtagttaaatgtagttgccgttcggtccattagcattagtaattttgatttttgttttggaagagaacaagagagtaatagagtaagagaagagagaaaaaggttgcatcgcattgtgtacagctgttacgttccaaaaaagctgtacactagatacaacattgaattttgagactttgatttttccagttacaagcaaaagcttgcgttcgccaaagttctgaaattttgatgtcacttatgttatcatgtagcagtgcgagcaagccaagagtcgttttcttaaattaagctaaacaagtaaggatatggaaacgccccttgccgtactccaccaccaatgataaaagtgacaaagccctgtgaagacaaacacattcaatagctacaataagttgtgcacaacttttagacttaacaactaacatctaagacataactagcatatctaaccatcttaacactattcttatactaaagttgcaaacgtaccgtcgctctcgtttcaaacaacttgtcattgctcctaacatgcaaaaaagctgaagaaaaaatgtggttcgttaattggctatcgcattttctggcgatctgcaaaagcaccgaacgatcaacaggtgaccatgtctaccgtcaatatcggaaagcagcatcaacatgatgcaagactcaaacagtagacactcagacgacctcgagagtaagtatatcatctcgagtgtcatttcaatcaactgagaattccagctgtgttaagctggaaagatattggtcgggatgacggggacaggagctcaaccgtctttccattttcggtatatcgagtctcctcgccctaacccaactacgccgaacactggacattctcaattgatcgaaaccccggatcaagttctagccgaaccaagacttggcatcgctatgccaacgtgcgttgccagtcttttgtgtcctaatcaaaatcctaacgtgtacaatacgagagcgacgcgactttgccaaagtactcaccccaggcattcttcatctgtcttgtactcttattaccacgaataacactttaactccgaacttgaacattttaacactagaaaaatcttaaacatactgacgcggaaacaccttgaaattttggtgaaatccgcccgcctaactgaacaactgagcttgtgcagccgcttataaaggctctgcctgccgaaaaataacaaactgtgacgtcacgaacgatttgattggctgatagctttcaacgtggtttcgtccaacgggacgagtctacactgaaagtaactgaccaatcagcgtcgagcattttttcctcaagttgcaagtggtcacatgaccaattgtacagccgtcgagagcggacgtgtttttgcatcgctctcggcttggtgtgtgtgacaacgtgttttcgatattgtttgatctggcagacacaaacatagtcctaggtcccaaagtatgttcacgatggttgaaatgcccaaatgccaactttttcctttaatacttaaaaaaacacgagtatggaccactttaggaaatatgtctctgcagcatcagacaatatcacatactgtcattaatgatgctgttttgaaatcctacatataatgtaaaactatcaaggtggaccgttttgacaaatttgtcttgcatggtaaaatgtattaggcgtacaaggataaaatgctatgacactcgatatcgtgttaccactagcgaaacattatgttttcatatcccacattgcatataatcatgtacagtcgcattgtcagtggcaggcgagagagattgttgcaaccgagactaaaaaaataatatttgtgaaaattggcttcttactctcataaaagatgcatgttgccttagttcaaatcaaacaacgactatgaatcgcaagagaagcctctctcctttaacgctttggaaagcggcacacgtgttcaagcaccaaaacctagagtgttggtttcaatttgcgaaggatggagaatcacacaacaaggtgtttgcatctgatttcgaacgaacaatgaagcgagcgaaacttgaagacgaaaaaccattcctgacgactttcagtgtcggaatacgtccaacacgaaatcaaaaaagagtgctgaacgagatgcttagagtgagcaatcacgcgtacaactggagcaactatctcgttcgtgaaaagaacttgaagcctaaacagtacgacttgcagacttacgtatacaagaccaattctagtgacgttccgatggaattcagaatggacgcaaatgacgactggtatttcgataacaagatgacaacgattaaaacagcagcttgtaagaacttctgtaccatgtacaagtcggcgttaacgaatcaaaagaagaagaaaaagtacatcaagactgtgactttgaaagacaaagacgatatgaatccgagtcaaggagcgttcgaaattcaaaaacaatttattcgtacattgaaggagacggacactgacgataatgatatattacaccactgtatagcagccatgccggacaattttactacgcgaaggaaggatgtaagaaatcgattcctgcgcttgcctaaaccagtgagcaaactgccacctttagaacatgccgttaagatcgtcaagacagcgaaaggaaagttcgtcttacatataccatgcgatccaacttacacgaggagcaaacggtacgacgaaccattcgattctatgtgtggcatcgatcctggcggaagaacgttcttgacaataataaacggacaaagaaaaagggggaaaaatggcacaggaaaaagaaaagtcagcgccgggtcgggagcaccatagacaagattgacggtctgcacgcaaagatagactatgtaaattcaaaaatgcaagcagccatacggcgaaagcagccccaagcaaaagaagatcggcaaagacaattacaaaaggtgtattatcaactaggtaatgttatcagatgggtgcatcttcgttgtacatctaatctgatgcaatactcgtacgtagccattggagagatcggcatacctagtatcattcgaaggcaatgtaatggaaaacgaagacgtatcaacaaaaaatccgtacgtcatctgacagtgtggaatcattgcaagtttcgtgaaaggctcgtgtatcgggccaaaggcacaaagaccaatgttatcgttcaagatgaaagctatacgtccaaaacatgcagcgaatgtggaacgataaacgacaaattaggaggcagcgaaacattcaagtgcataaatcctagctgtgattatattacgaacagagacgttaatggtgctaaaaacattcttaggaagtcgctcggtatcggctcaattaaaacgtaccgtgcatgactttgaacactggaaagtaagatcggttgactcgccgagttccggctgaaccttataggggaagcgttggtgaacaaaaagggtcaatgccagatcaaacctagatcacaaggatcggtatcatggatagacattcgatgcttttccccgtacatctaactgcggcgtccggacagctaggcaaccaaagagtgtaattcgcacatctcaatagagggaacgtcgtgcttccctttggcggagcaaaagcatctaatgcctgtccatgaattctcgcagcgtcgggcaaagtaattccccataccggcttcgctgcctcgccaaatacggagtcgggtcattataaccagcattaacactttgcccatgccgatcagaatccaaacaagggaggaaaaatgctcaacaccatgtaaggactaggaaaaaattccaacatcataccattgcatcgaaaagcatttcaaatctctgagtaacgttcgctatcatatagccttatgatcacgttttggcattcagatagtttgatacgagtcttaatatgattttgcattacagcttacttgaaaggttgacaagacgcatctcttggattttataatggttttcaaaaagatgtaactcttgtcattctcaagtatgtaagtgttatcgctttattcgcattgaaacgatgcattgtgctactatagtatcagaggtttgactgcaattcgatgcttggacataaaggctcgatagcaaatacaaaatgtgacgttcaggaaaaaatgatcagtcagcaatcagttttgttttgcaacgtgttgaaatttcgaagtattatctgccttatctaatatctcaaaagtaagattctatgaaaagtttttcagttcgactgtatttttcctaacgtgtcacgttgtatttgccaacgatccttacttgatgtatgatatttctccgagatgtgatagaccgcacatgtctaccaagtactattaatatttcattaggacagcgtacttggcaaacgagtcggtatagtataatttcggacagaccggacaggctattggactcataatacagacaaacaacactaaatcttcatctcggagactgccattactttttatattgaaatacaacaaacacaaaaagcaatagtgtgcctcttttatgggcatagccacttgtacgggcaaattgtatcatacgaaacaatacatgcaaatatgaaatacatcagagtctatctttttacttcttccaaaaaaagcacacatcactgttttgtcatcaaaatgcagacaacactgtgagctctagcatcttgtctgtttggcagcctgaaacagaaatgaatatctttaatagactgaaatacattttgaaagtatcaagtcttagatcatttatcacaaaatacaagctataagaccatcggtcaatcaattttcatatttacaatgcaatgtgaaatgacactgaaatgctttgagaagtttcttcacacttacaaattctatgacaaatgttcaagtatcaagcatcaagctggaatggcattatacttgctgagtatttgtgaaatgcataccttatttttttgctgaggaaaatctgtcacacaccacttccatatacttgtaaaacttgagacatcttgggatgttcaaatcaatacagttctctgaaaaaacaataagcaaagcattagaaaatcagtacttcttgataatgcattctgcaaagtagcctatgcatttctacacaataattatgagacaaaatttggtctagaaatgtttccattatgtataactgagcatctcaaaaagcttggctagttcatatgacaatcaacagtgatagccgaaacatgcattcagtgcctctaaaaagctgaaattattcctaattcagtccgtcaaaatgcttatttattcttctagaccacaaaacattgaacacagggtctagagattccaccttgtggcatgccataacgtatttcagacgctatcaatttacccggcttcggctggcagccatttttaatttcaatacaactcgaagagaaaaccgacctacctttgcatgcagattttgtctcctgtaattgccatccgagtccatccttggtagttttcgacggcagacattctgagatgtaatttgtcataaagatttttcagctccctccatctgcaagcacaagaaaatgattttattccacagaaatactttggcgcgcaaagccattactcccgctccttgctgaacctagtttgacctcacgtttgaccccacgtgacccaggtcaccgcccagatttgggaaaatacggtctaattttagacttgggtttccagaaaaagttcggagatggtgaacgacaggacaattacaaatcaatgttttgaagtcaattcttatcgcagaaagctgaaaatggtctcatggtaaagcgaagacatttgtctttgtggtatcaaattgtcagttgcgtatcttgtttacttttttcagaattatcgcccaaacatgtacctttgttgtcacggagcggccattttgttgtttaccgtggtctgtcatttctgagctagaaattaaggtacttccgccatcttgaatttagagtgaccttcatttgaggtgtgaaaatatagtgaaaaaagctttcaaatgcagctgttccagagtacaaaaacagctcagtttgcaagatctgaagtaaaagtagctgtataaaaagtaaaactaaaatttggaaataaacaaagaagatattttacctgtatttttccaaatttttggttagatttataaatcctttcaaaatactttattaaaaattcataaatggcaaaagttagttcaaagtatcaattagtgcataggagaattgtcttaccgaatagaactaaacttagtacaaaatctgtttttcaaatctgaccaccttatgtattaaaacgaaaataaatctgtacatattgctattttcagcatacataaaagtagtgcaatgtgcggacaatgatttttctatgtatggtgtaccatactgcctaaaattgtaagagaagtctcagacaatgtgaacaagacttgcaacgatccaaaattttaaagaattgcgtgtttacctgtacgattctttgtttttaggtattatatttatgattttgttaagtatcagtcaacatgtttttatctaatttctcgaagaaattatataaacagcttggaaacatgacactacgttcgtactcatccgtactccaatataactcgaatgtaaaaatattattcttgaagttgtgatcgagtccaccaaattatgaactgatatgaaaaattatcggtaattttatattgtaataatgagagagaaaaaaatcgcttaaaaaccttcaggatgtgcttttgatagtgatgtttatttccgggccctggagtcggatatttaaaacatgtttaccgtttccaagaacaattggaatggtaaataaaaatgtaccggaatcatgaagtcaatacatatgaaaacaatacataaatcgtcgtgaaatatatttttatgcaagaatagcgaccttcggtcacggtcacaaacaatcccgcgggcttctgcagacgttaatacacacacaaaaagcgtgtattatccctacaataaatatgtattgaaattccggcatagaaatgaacactgactttacattagtagtcactgcggtgttgacagcggaagcagcggtccagtactaagactgtctacaaaaccaaggacaacgacttctttatctgaaaattacgaacattgggatcagtgttcagtatacacctgaaaataatagacttgctatttgccgagtgcacacttgttttctatcatcgttaatataaattagactagtaaatattcgtacatatgcataatctcataaacacttctttattgtatgttctctgaaattaacaaaaaactggcacagctgaggcaccataaattcagtttatttaccacgaggttcaaaatgcacgggagtctcgtgatagtacatgccttcaatttcacatggttaaagtgtaaacaaatagttaactttgcttcgttttatttctcacggaaaagatcggatggtttttgatattggaataattttagaacatatatacatttaaagttgaaagttgatcgttttctacaggatgtaaaactgaaacaagtaagcacttttactttttcagcaatgtccctcaggtgaactttgacactgtttacaaagagaaaccagttttgtgtcatcctgaaatgcgttgttcggctgaaacgtatagttccctgaaaagttctaaaatggtttattttggggatttttgttttatttatgtattcaacacaatgtgcaatatttccagtttttgaaaatgattgaaattgaactttattttagaaaaagttccgatctttcaataatattttgccagcgtatgcttacacattttaagtgaaacgcctttcttgtccaaaggtggtgtgtaaagcgaaaaactatcattacacattgcgtttattctttaaatgtaaaggatcggtaacagattaaggagatcgggcagtgcgtaactgtactaaatggatatctctaaccatgaataaggaggcatatatatttcagtatggaaatctcaggtaaaagaacaatcatatatttaattccttgaaataaacatggcggcgaaatattttagaaaaactgtgcacgtgttttgcgcattagaatgtttaacgacattttcttgaaaaagtaacgctcgtgtgcactattttggcatttctttgacttgaaaataaatattttatagcaatttaggttgcatacgataccgaaattttgcaccaaaaatgttcactcattttcatccaaagcactgtggagatagggttcagcgtagctttcatgctcgca

SEQ ID NO: 4920 - DNA, 10949 bp, Mercenaria mercenaria
  source 1..10949: mol_type = other DNA
tgtcaaatcccttgaagttgtggcataataccgttgacccgtagttttcggcagagaacaaccacctgcagaatgactccgttgtgtttgaaccttgaaatactctttggttttgaccacaatgcacgcagctgctgttgtcagtcacgtccttgtccatacatgcactgcacactttgtgaacaacgcaaagacttggtctgtaaccatacaacccacaagacgaactgccacagttgacacatttatcgttttctccagcaacgaaacctagactcgcattgaatgatctcgtccacactgctctggaactcgaagaaaatatacacctgtctggaattcgcattactcttactggacgcgtcgacaaccttcatgtaacactcgtgtccttcgccaaagtagcccttacacgttctgcagtatttctcgccacagacgtgtactgttttacgagctttcttgtttatcaattctcggcacagttcacatttaaagactacgtcgcacgtagtttttcctccttttcgcttctccttgtgcagttcataacaagtagcactgataaagtatctattacaatcagaacaataagtccattcttcgatgacatcttcatgaatatgacgacacactttacaagcactgttacacttatgtttctccttgtgatcgtatcctttcatacatgtttcgcagaagtagtttctgttcagaaaaccagtaattttcgttatcacatcataatggttatcgtgcatgtacagataaattggtattcctccacctggtccgacataaacgaagtcattgaaacattctttggagactacatttatcttgtactttggtagcacagcttgaaacttccttatctcttcgataccacactgcttttcaataattccagccatttgatgtaactcgatagcaagatctttctgtataccatggccttttcttatactgccccatctcggatgcttttctatttttgctcgcgctgttacgatcgcacgagcgcagcacaagttgtctttgtttcgaatcctaataatggacttgctttcgtgtagaaaagccgacaaattcactttaggttttgtttttgaagcaccgcctttcggtaaacgaatccaagttctctcaacgttcaatgatttgtcgagtatgaaattggtattgtaattgattgactcttccatttggttcatcactcgatcacttgtaagcgacgagcattcggttagtggaaccttgattgggaagtcatgtgacggacttgtaaacttcaaaagtaccaagtcggatgaagctaaaggtgccttcacttcgtcaatgacagcttcgaacatatctttcactgtattcatcgcatctggtagactctgtatgttcaaatcttctaagtctaaatcgtacgaactgaacgttgtacaaaatttgtctactctcatttcgtgtttcaaccgtaaacgtcggttcacgtcaaacggttcacggttatgcgttttcattttctttctgtgacctgcatcgtcaatatttgcaatatcatcaactcctctttttacctgcatcaatgaactcataataaatacgcctgttctcacaggttataccaacatggcatttcgaggtctcttatatacttattttcaacccagcattatacacatacgaaaactgtacgtcgtatcatttatgcatacttatagcaactcctaatatcgtagtagtgttgtgcctcattataggccagatgggaatactcgatgaaatcataaggatagttgttagttgaaccaaggatcttaactagagattagactgtggtcttagtttttagtagaactctcatactctgttgttgttgttgttgttgatgttattgttgttgttgttgttgttgttgttcctattaatgttaacagaattgagagaacaaccacagtcaattttataacacagtatcggtggaattcaaaatataatgagccctcgtttattcatcaagtcaaacttgaaaacatgaaccctttattcacgtcattttgtcccctgtcctcatttgatagtctccctggcccataatgaggcacaacactactacgatattaggagttgctataagtatgcataaatgatacgacgtacagtttttagtatgagtaattgacataatggtgtaaacataggtacgtgtttattattataacgaggttgactaggacatgatacgttaaaaatgagaatgcggacagttctttgtaatattgactacatatatgatgataccagattttggttattcatgaatttcaattgaacaattgaagaaaaaatgagtatatatggaagaggtaaaaacagttttgttcatcgtgcggtgttgtgtgcttgacctgacgagaacatacatacaaaacacgcacacatgtctgcgaatccaatcgacgtacatttcagacaggcttcgtcgaatgacaatgatgaaaacgaggaagatgaacataaggttgaaaatgacttgttgtatcgacaattacatgacagtgtaacacaagtaaaactgatcaaacacagagaccgctatacgtcgttctctgcgactgccaattacgagcaagaactggacgatatcttgcacgtacattgtaagaagagatcggatcccaattttgtgaaaagtatatttcttgtgtcgccgtcattaaagactctgaacattcaaaagatgttgcacaaccgcgtgtacattgaagagagaggttgtgccaaacaatggtccggttacaacgttgactacgtgcaacagttgcattacatcgacgttcgaaagttcttgaactacctgtggtgcgaccagttgttaaactgtacaggttttggcgacaaggtgtgtcgcattaagcttgagaagtacgtgaaaggcattctctataacctgaactgtctgtcgtgtacagacgaatcgttgttagacaatgccatcgaacacgtcaagtcaaggtatctgaacgaacttggtaacgtgatcgacactagtctcaatgcgttcgtttccaatttcaacatgaccgagcagttcaaactgttcgtcgaatgggacatgattctaggcgccgtgcctgttcgcaaaggtgtcagaaacagataacgagacggtgagcaggatcaaacagatcaagtcttgtttttcaatggcaacgtttcaacgactgctgacggttgaaaatgcaatacctcccatcgacgacgttgcagtcatattgtgcgagaacgagatagaatgttggcacttgccaactaaggagaagttagaactgttcggtacgtgtaagcttagagtagagaacaaagagatctgtttaggaactgcaggcgagactctgtactacgccgaactgaaagtgatgcacttgaacgagaaacacgtcgagtgccttaacatgcaacgctacgttctgacagaagtggctcaagacgaatccgataaggcgaacgaacataagaataagaacgaagggaaaacggacgtggatcagagtccattgtttgccactctgacaaagtcgcagacggctctgtttgacgaagacaatcctctgtctaaattctcgcgcattcgagacagaaatgaaaacatgaaacagtacctaacgcgcgtaacgaccgaaatggacgagttgcaagacaagatgaattctttcctctatcagatatcaccgacgaataacaacagcatcgtagacgaaatggtgcgcataggtatggaaagctacctgaagaacatcaaacccaagatggaagaatgggagagaaggattcgagatcacctgaacaagtttcgcatgcacgccgtaaagcagttggcaacgttacctaaagatctgtacgagtttcaagaacaggcagcggcactgaacgccgacaacaacatggacatacaggaattcatcgacgacatgtcttccactaacgtgtctaaagggatcagggttccaaacatatcgagcttgcaagacatcgacaagtccgaagccaacgtgaaacagatgcaagaaaagatgagtcagtatttcgaactggccacaactttcatgggctatcttcgagacgcacagaaagtgatatctaagttacgcatcgacgacagcatgaaggagcttcaagtgaaagcgttgaaagaacaaaagaccgagatcgtgaaacttgccaccaggtacagggaaatgtcgaacaaacgcgtggacacgtacagagatcagtttcggtcagtcaaaaaggaactggagagatacgttgactttcaaacgcagactgcggagaaaaccaagcagcactttctgaacataagggacacgatgctgactcacaaaggcgaatggatcgacaagtttcaggaaaagagagacaaacagacagaaaggttgaaactcctagaggagaactttgccaaacgcttcgactcgacgacgaaccagttggacaaacaagaagacttcgaacctcagatcatcaaggtggaaggtcgcgtgagaagagacaatctcgacaaacgaatagacgacaacacgttgctgatgtacagagaaatgctgaaacaactttggaagggagtgttgaaaaacctggtctgcattcaagagacggtcaccagaaacggtattcagttatacaacgtcgacgaagagcaggtgttgcaaaagtacgtgctgaatttcttcaagcttatctacggtcaggttttcttcgtcaaccgcagaaccctcgacgaatgtgcaagagtgtacggcatttacatcgcaatcgaggttgcggttaagaagatggtgaagcttccgatcgaacagacaactacaacgacagtcaaacgtaagagttacgacgacgaccgcgacgagaacactgatacaggcctattgttttcgaattaaactatttaaggttctaaaacaagtcatggattgacaaggcacgactgctggaattgaactgtgccagccaactgctcgaaatctatgaaagactggaaagaaaggtttctccgactttcgaaaaaagtatctaagatacctcccttgagtcaagacataaaggtttgcaaacgtccgaacggaaaattcgtactgcaaattctttgtgatcctaaaaacacgcgaaggatacaagtgcacacatcggactcgatatgttccatcgatccgggaggcaggacgttcgccacatgttacgatcctagcaatataaaggcatttcaaataggacccgaggcagacaagaaagaggtcattcacaagtatcacgagaagatcgaccaagttcatcgtctcttggcgtacgctcaaagaaaaagcagacgcaagccgtacaagacagaatcggacaactgaagaagctgcacctgaaactgaaaacgtacatcgacgacgtgcacttgaaaccgtgctcgtacctggtcaataattacaaactggtcgttcttggcaagatatcgatttcctccatcgtgagaaaagacagaccgaaccatcttgccaagaaaggcaacagggacttgctctgttggcaatatttcagattcagacagagactgttacacagagttcgtggcacggactgcgaagcgatcgctcaagacgaacagtacacttcaaagacctgcggtaattaaggagtgaagaacgacaaacttggtggaaaggaaacgtttacttgtgaaagttgcgattacaaaacacatcgagtcgtcaacggagcgagaaacattcagtgcaaatactttggactttttccattcgcagcataacgaaagaaaatgacaatcgatttctcgggtttgattctatcccacttgactcgaagagtcagaggacccgaagacattttctgcacagattttgccaatgcaagatctggggcaagaatatctcctggtcaaaagagttaaggttctaatacattagaacactgatactggtctgttattctcgaattgatgtatttatgttatcacaatttgttctaaaaaaactattaaattgctatgagccgtaatgcaataaagcagttcatcaaaattatgagtcagtttgataatttggatgataacggcattgactatgaggcgaacaatctgtacgatgaattcaataacacacctagtgaatcgcacaagttgaacgttgtcgagtcagacaagagggaaataaagaaggctaagcgtagcagtagcagtagaccatctctgttactcgacgatccatcagtaaacgataacacgaagattgacatcgatgagtctgtaattgaaacaacgaagtccgacttctacaagacattcaaacgattagtcacaaactacaccaaagactggattcgttctgtttacgaccagaacaggcaaagcattgaagacaggcaagagaaacttgatgtacgagatgttacaacaagtctcgatcacgttgatcgaaatgaagacaaacatacagacactcctgtcgttcctgtgaacattccgtccgatattgacaatgaacacgccacaaatgaagacatctcaatttcggatgcaagtatttcaactgcggcaggtacggtcatcattggcgatgctagtatgtctagatctgatgacacagtgatacttgataactcgaacgatgatcgtgtcgacaataccattcacccatatgatagcttggacaacaaagacctcgagaatgacattggaacggagtccaacgcaaatacacaaaaacttgcattgaccgattcgcctgagtcaatagaaccgaacgcgtcagctggcgaagatacgttaccgatcttgcacgaggaagaagaaagcaatgcggacaaagataacgtgtctgagtcagaaagacaaatgctagcattcgatatgccgattgtccaaacggaacaaaatccatcgactgatgaacagacaaaacccacgaaacaagcgcttgatcatataccgacgattaaagaacctttgaaactagaaaagcaagatgtgaaattaaagatcctacgtcccacagccatcgacatgacactggcgaacgagaaaaacctcagaggttcaaataacgaccttaatgttacgccttacgtccaatatgtggcaaacaagaaactctttgaagacgaggagctggcgcctgagcatagaacgcatcagtgcttctcttggaatattgtggctctgttctttgcacaatttggtggcagacacgcaatcagcattagtgacatagaatcgatcatattcggtggtacgtttctgtacatgaaagccgacgagactgtcgatccaaacttcttaccaaagagtttagtctatagaaacgtgtatgcacgagtctcgaaattgaacgagtcgcttggtgattacgatataagtggtctctgggaaggcattcaactagtattcgacactcacgccttttggttgctactagtgaatgagcatcacagtttcgcactgtttagattacctgacgcgttttatcttttcaatccacacggaaatgtcaaagtgaactttgcggctctaactggttataaaaccataacagaacttatcgttcacgtacaatggttgtgcgaccgcacagacagattcaagttacttcctattcgactgaccaaggacgagacaccgttagacatcagacacatcaagttggtcaattcatttcaagccaacgtagaagatgttgcaagcaaaagcaccaaagtctttaatcactgttacaaggccgaaacagtaacgttttcgatattcaacacgaggaaatcgacggactctgctaggagtgctgtgtattcctgtctcgcacttatctatgctacgtacttcgatatcggttcgagaatcgacgagatgatggtttatggcaatctgctttacaaccagatgctttgtcataacaaacgtaaaaggcatatcctacccatcgagctaccacgttacattcaaattcaaggcattggaatcagaatccgactagaaacgaagacatgcgtgggaaaggtagataagaaccttctgaagcagttaagtgatatcatcgagtaccacggagaacaagaaaaactcatacttcattttgtagaaaacaacgtgtgtctcgctttgttcggcaaggacaacaagttttactgcttcaactctcagccacacagtgtaaacagcggactgcctacagaaattggcaagcccgtactcctccgtttcgagacaatcgataatgcatgtgattacattagctgcttcggagaggattaccaactcactgattccaactttatagtctacgttccgatgtttactagagtgaacgatgcaatcggattgcatgcaaccgatgctgctttcgtcgtactacccaatgccacagacacgttgcagaggaaacgtgcaactaaaagaagactgctagcttacgactatcaaggaagctcgcttgaagcggacagtgtcgaacaagaacccaaacggattaaaatagagcagccacagacacttttgatacaaaccgagaacacaatacttgatcttaacgcagacatgtctgtggaaagagtcgaagagacgaattatcaaccagagccgacacgagacacgaacgtcaagcatatcagacaagtacgctttcaattaccaaccgtcgacgaaaccttaccaaaagtgcccgtatcacaacgtcgacgcaaaattattgccaagagacaaaactcgaaacgtgcactagatacggccgaacgagcaaataaagataaaggtgataaacgtgataaacatgagaaacgagctaaacaagctaaacggactaagccaaagacacacgcacaggacaaacgaaatgccaagtttccagatctctttccagccgacatatcgtcggatccgcggactagtaaatacagtgccgaaatatcacagataaagaaagtgaacgatacccttcttgacactgccaaacacgttagtgaacatcaaaccgtgctaggtgatatacaaactcagaccgacgtcttgaaagatcaacagagagaactagtagaagccatcgaggagttacgcggtctctctcaactgcaagaacaagtgacgaagttgaaagaaactcgagacaaggagaacgtcaacgatctagaggcggccaagttacaagcggagattcagtcgactcagatggagcacgatatcaaactgaatcaaatacaatcgaccatagccattgctgaaatcaaagcaaagagtcaggcttacagcgtcaacacgcagtacgagctgggtataggcaaactgaaactggacgcctggcagaccgaagttcaaaactccatgaatagagaaacgttgaacaagaaccacgaacatcagtttcagctcatcaaagtgcagtccgagatcgagagcgagaaacagagacaaagagattggtacaagacgttagaaaacgatcgcgaacgaaaattcaaacaagatcttcaaatcagcaaggagagaacgaatcgcgagatagaagaccttaagctgcagtttgccggtcagctcgaaatgaagcgattggagtcggccgctctgttgactgaacagaaagcaaacatggaacgatacaaggcagacttgcttgctcaggtgaagaacagacagatcgataagcaggacgagaacgaaaagctcaaactgcaactgaaactcgacgagtacaatctcaaactacaagacgcttcggccaaagcgtcctccaacaagtatctctttaggatgaatccaacacctctcgcggctttcgagtttcagttggaaaagtcggccgacgtagcaccacacactgtgatacacacgttcgagcagttatggaacacgcagtacgaggtcgacatggatcctactcgagtattcaaatataagaaggaattaatcagcattggcaaaaaagcagttgagaactaccctagcttctctatttacatgaccaaagatctcacaaagacgaccgtagaacgacgtctagcgtattgcagctacttcggtcgaccgggaatgtttatttacaagacggcacctacgttcacattcacgagacacccaacgaaacctggtcacgtacgactgctactcgacagtgcaaagcgagaagttcagttttctattcctaggtactcggtgaccaacgacggatctcatgtaattgacatgttagaatacatgaacaagcagatcgtctttcccatcaacgccatatacaatatcgatgtgcacgctcgcgatgaagttctgttcaacaacagaatcgtgtcttgtccagaactcataaacgatgtatttcacaacgaacacaaccacgagtattccgtgcgaacttcattacgcagtcacacgtcattgtctaacgaacagcagcgaacgaacgtcattgctaaacgatctacacctatctacgtgagcgacaatctagttgtgctgccgaaactgagaatcatgccaataaaacgaacccacaagagttcagattttcgcttgaaaaagttattttttgtcattcttttcggctatttaagcatgctcataactcggactgaatcagtcttctgatgtctctcatcgagtgaagatgtgtgattctgcaacagcggatgacattttcttcattcatgacatgacaacgactacgttgagcaacaagcaactgttcgcttattgctccagcaacaagattgatgccagcacgatacctgaacacgtattcaaccacgtgacgcggaatccacaaggtgaaacagaagtggtagtgattcagtgctacgagtgtgacgaaggaggaaacgttcaacaaaacaacaaacatttggttacggtgataggtcagcgatatactcattacgtgtcggatgagagtagaggaacgtttcgtggaacc

SEQ ID NO: 4921 - DNA, 10838 bp, Mercenaria mercenaria
  source 1..10838: mol_type = other DNA
agacaacatgttatgcgcaaaacccaggcccaaggtttagtgtcaaggtcacacttagagaccaaatgtcagacacaagaatgactttgtctggaggatttcttcttcatgcatagagggattgtgatgtaacttggcacagatgttcaccaacataagacggattgtcatgcgcaagagccaggtccctaggtctaaggtcaaggtcatatttagaggtcaaaggtcaaattcaagaatgactttgtatgtcatatacaaaagttaaagggaaccagatatttgatagagcaagtactcgtactccaatcagaaacaagttctaaaaatagcacgtctgctgaggtataaataggttgatggatgacagagagggcattctgtatccagcgattgaagaagacacatcgaggattcaactaataatttatcccagtaccttgataaggaagttattgcaactaccctgtcagggctgataaataataaaaagaagacgtttgaagttcatagactaaagaagaaatgcagaatttcaataaggttttgagctatagggtccagcgcattggagttttaccttaacggtagctgaatgctatagacgatagcaaatacaggctgagcatcagaaagttgagacagatgcccagagtttggtaatctactgtgatagtaggaagagttccagcttatagacggtcagcattattggcgaaggacagccaaggcatcgggaatataccaataaggtacttgaatgctacatatgatagcatataggtgctgagcattcaggagtcagggcattcatataggagttgaaacttcaattaagaggacaaaggccgagcatctatgtgataggactcgtatgttgttgattcaaagacattgtctggcgggaatttcaacaaaaagatcagtcaaatatagagtctccagcctataggagtttgagctttttgaaaattgttagtttgaaacatttagtgatttgcctgatccctgaaattgtctagctcataattaaaatcatttacgaatcattggtacacgaatcatttaagcaaggtagccagaggaaaattctgtatatgagatatttggtctcaccagctatacgttttaacaaaggacattctacatcgtctgtcagctagtctaagacatagtcaccttagcgataggaccaatttcattgttcaagatactaaaggcgtaggcacttccttggtcatgtaactcgtatcctgacaatttgggggctcgtccgggatatatatccaaggaggtacagagactagtggttttaacgttttgccggtgtaccaaaggataaaaagacagtgtagctgagagtatcctgagctacatatattttagttccagagatatttccagcttaaggtttcaagatggactacgataaatgggtggcgatgggagaacgaatgggcttttcaggctctgaacttagtgattatgttgacagaaaagagaaggagtatactgaacgtgaggaacgtatgttgagacgagatgaagacaggcatgaggtttgaggctcaggaaactgaaaagaaacgagcttgaacagtctgagaagaaaaggttatttgagttggaaagtttggaaaaagaacgagctttaaaagaggaagaacgagttttgaaagagcaggagtttgcaatgttaaaacttagggctgaggccggagctttaggagctgataaaggtgctgagcacttgagcagtaaaacattacggccaagactaccgaagttcgaagaaagtaaagatgatatggatgcatacctcgaacgatttgcacggtttgcaaaaagccatggatagaaagaagagacatgggctgtgagcctcagctcatttattacaggaaaaggacctggatgtatatatatataagcatacctccagaccaagccaacgactaccctgcattgaagaaagcagtgctgaaacgttataagttgacagaggaaggttttagattgaagttcagagaatgcaagccagagcgaggtgaaaatgttttttagtttatggcaaggctgggcaggtatttcagtcgatggacagagatggtagaagtggacaatacgtttgaaatgctgaaagaccttatgatcagagaacagttcatccaaacttgttccaaggaccgtgctttattcctaaaggaaagagttgcaaagtcgagagctgagattacacagttggcagaacaatatattgaagctcatggcggctctatcacatctaaccggatgaatagaagtaatttgtcatgcagcaaggtgccacagccttcgaccgaggttcagccagtgtctcagcctacacaaagagaaaggccagtttttaagaagcccatatgtttcatatgtaataaggaaggtcatatagcacgagaatgcagaatccaaaaggaaagtaagcggtgcagctttagctagtaggggatcctatgaggaaagacagagaaataggcatggaatgcaagagtctacacccacagactggagaaggaaggccaagcgcagaaaaacagacagtcggatgacagaaaagttgcagcctcggttatagcaatatcattagatgacgaacggttaaaagactgcatagaagatggacgacttatgttagcacatggaaaatccatttcggttatagcaagcacctgtaccattgattcaacaaacggtgaaatgaacttgatattgaagaaaggatatataggtgataaagaagttcaggttttgagagatacagggtgtgaattggcagctgtcaagacagaaagatcttgtagaattaaatgttagataagaggtaccttatggttgcgatcgatggacgttcaaggacagttcctgcagcaaagatacaggttgatacaccatattttaaaggtgaaattgaggcaatggttgtgccgaacatgatatgcgatttgataatcggtaatataaagggagtttcaggtaagccagacaaactggaaaacccgagatgaaaggcagtcttcatccggcgaagatattgctgcaactgggatgacggaaacccagcatgcaataaatgtgggtattacagaaccctctgaggtttgcaagttcaaagagcaaacgtttaatgttgagcaaagaaaattgctcagaaagatgatgagacgttaaagaaacttaggacttatgctacagacaagtcgaagctgaaaacaaaaagaggtttcaggtttcattatgaagtgaggaaaaacgtattatatagaatcttcgaggagaaaaagggaagagttgttaaacagatagtagtcccaacccagttcaggagaagtgttatgacattagctcataagtcaatagccaggggacacttatcagcaagagacacttgataaaatacaaacgagttttcattggccaggcacttccctgggttatataactcgtatcctgacatcggcacagccctggtcttgaccacactttgtttctacaaagtaagatagctattattctatgtttataaaactatactgagaagagaatgactgaagtttgcagatgaagttgtgaaaacagggcataaattgtccacctgtcatcttgtagaatagctgtattataccagtattaccagaattatttgcaccaaattcatgtggaaggaaaagggaggccactaggtcgtggtgggtctttaacacttctagtaatttcttgaataccgatggttaaaaataaacactaaagcctttttattaacggttaatgcgaatacgataatgttacacaccgatagccgcacaagaactacatgcagatacagacttgtcatagtacgctactgcgaaaatataaagtggtagtattggactgggagttcatggcatggttcaccacatcaacacaatgtgcagagcacaagttccggatggctagctataagagcaaggtcacttttagggtcaaaggtcatacctttgggtgtatattgatccaagttgaggtactctcgtttataattgacctaaggaaaaagccaaaaccacctttctatggtactagagctatccctaaaggggatgaatacttctgcctcgtacactgtcacttggttaaagtagtactgtttaagagacataatggaaaatatctaggtccgagttatctcccctttgctagattatcttgtaatatgaacatcctcatgtcatatactaccagtctgtaaagtttcaacaaaacccttcaaatagtttagtgttaggttcacaagaatcatggacagacataaatggacagatggacagacgtgtaaatttaattaaactaaaaacaggactcatattaccattttattaattcaactaacttattcccagaacatttaagtaataaactgcaactaaaaaacttgtgtacaaggaaatgtttaaccataaccaaaagttatttgctcaaaataagtttaaagaattcaatttatgaaatcttaaagaaaggctacacaccaaagtacattctacacaattatgtcacataagtaagttctgctgtgcttctgtatatctgtacagaatcattttaaaatatgcgcaaacaaagtgtgccacgtttttctttcatcttaatcaccagacgctttacaaagaaagacaactccatatagacaatgtaggtgtaacaccacttaaatctcaactgatgtgaagaattgtcgttcctaaaaatcttaaagacgcgaatttttcaagaacagggatagcaatgccggtgtttctctatttaaataggtttgctttttatgtacactggaaatattgtgagcatacagaaataacaaaattcccgactttttccaggtgttttgctctttctttaaaattcaaatactgtcaaggccttgaaaatgaaatgaaaaattcaaggacttttccagttttccaggaagcgtgggaacactggaagggtcattcgaagtacagaagttgtttgttagactacttacaacaaaagacataccaaacgaacgaattaggcaatcgagaattgccttgatgccagaaagtttctcgaaatccaagaaagactggaaagaaaggtttctccggctttcaaaaaaagtgtccaagataccgcctttgagccacgacatgaaagtgtgcaaacgtccaaatggaaaattcatactgcaaattccgtgcgatccaatatgtacgcgacagatacaagtgcacacctcggactcgatatgttctatcgatgcgggaggcaggacgttcgcgacatgttacgaccctagcaacttgactgtgtttcagatcggacctgaggcagacaagataaaggtcattcacgaattttacaagatcgattgggttcaccatctcctgtcgtgcgcgcaaaagaaaaagcagacgcaagctgtacagtgacagaatcttgctctgttggcaccatttcagattcagacaaagactgttgcatagagttcgtggcacggactgcgaagcgatcgctcaagacgaacggtacacttcaaagacatgtggcaactgcggagtgaaaaacaacaaactgggtggaagtgaaacgtttttttgtcagagttgcaactacagaactcatcgagacatcaacggagcgagaaacattctatcaaagtacttgggactttttccatttgctacataaaacaactaacacattctagggctcgattctttgccttcttgatgcatttattgccacagatttttctaatgcagtttctggggcaagaatgtgttcgggtgaaaagagttaactttattactagaccatcacgttgtacattcaacattgttttgtttttctatttcgatgacgaattacgatttgagtattcaattcagatagggaaatgttgtacctgtctttgtaacacaaaatgtaatacaagaactgcttctattctcatttacaaacaaagatgatttgtcactgacttttccaaggcggtgcccattgttttcatttttttagagaagttttgagaccagatttatatatttttttatttagactatataaacaggtggtgcttcttacaacagattactgatgagttcagtatcttaccaacacggaatatatatttgtaaagtaaaaacagattgtcattacaacaatatgtcagaccgtaaagatgaggaaagctatactccaaaggaaacattgactcatgtgatcaattggaagaagttaatgaataaaggatcaagcgaacaggaaaagatggcacttacgttattgatgactatccgcatgatgaaagatctcgacagtttgaagtggttatgtgaactatatggactgtgacattgaaaacattaaaatggagtggtatatgcatgacaagatagaagacatgtatttgttatttagttctgagcaataaacaggaaaaatgaatgtttgtttctggttataagttctcatacacagtggcagcggtgcccgtttcgacgcacaactgtgtactgtatcaacaatgaattttcctttatctcaatgaccaatctcgctttgaacatctaaatcagacaaagacatgttggatctgtatttgctatacaaaatgtaataccggaactgcttcgtttatgatttacacacaaatcctagaggtgcacagacagtcaacattgcgcacaattttgacgcgaaagaacctatttcaattatagtacacgttcaaagtttcattgtattttgagttgttggaagccatcttgatttggcagtccctgcgttgtcacaaacgatctgattggacgagcgtttcagtttcaagatggcttccaacaactcaaaataacgtgaaattgaaatattttgctagaatatagtcattcgttggatctgaattaggtaaactgtggaattgcagacctttttatttaagtgaatgataggtatagcgatatgccgtcagaatgcgtctgagtcgccgaaacgacgatgtcatatgtttcacattgtttggcaaatggacatatagcagacttaataccttctaataagtactgttttgatagttgagaatttttttttcagggttgtatcaggggtcttgtagggtggggatattaaggaacacctgagaatgtcagattttttttcagggttgtatcaggggtcttggggtgggagggggtgaccagtcaatgatactgccacctgtgctcagaatgtctgccattgaaaactaccaacgatggactcggttggcatatacaggagccgaaatctgcatgcaaaggtgggtcggttttttcttcacgttgtagcaaaaataaaaatggcggccagcaaaagctaaatgaaatgatggcgtctgttgaatacgtttaagcatgccgcagggtggaatttctagaccttatgttcaatgctttttggtctagaagaataaataagcattttcactgattgaataggatttatttcagcattttagagttattgaatgcatgtttctatcaacaactgttgatttttatttgaactagccaagctttctgagatgtttctagaccattgtcccatttttgtgtgtagaaatacataggcgatgttgcagaatgagttatcaagaagcattgattttctgatgctttgcttattgtttttttcagagcactgtaattatttgcacaggccaagatgtctcaagttttacattcaaactgaagtgatgggtgacaggcttttactagcaaaattgtggaggaaaaatcaggtagctattcatttaaaaaaatactgagcagataaattatgtgagactgtagatactttcctaagcatttcagtatcaagtgtcattctacatttgattttgtgttatgcagaaaacattaaaatatgagcaatgtttttgtttagtttcattttttcagagcacagaacacagaaataccttgaatttcaacaagcataatgtcatatagctttgaacatattgttgcattgaattactgtcataaatacactaagacctgttcattttcatttagaaaatttgaaatgcatttcagtcttattttttatgtttttttccattacaggtagctagagcagaaaccaaatgcaaatgactgagttcaaactgatgtgtgctttttgatgaaacaagagatagactttttaccattcaaaataatagactcttattcagtccatatttacatgcattgtatttcatgttgatatctgcccgtacaagaggcaatgcccgtaaaagaggcactattgcttgatgagtttgctttttcatttattaataataacaacagtctctatagaaaagtactccaagatgaaggtttagtgtgcttgtctgtatcataagtcttatagtctcttctgtctgtccgaatttataatatgccgacttgtttgccgggtacactgtccatacctaatacttagagataagggtattcatctgtgatataaatgaacaagttctctcacgctggttgtacctttgcttatttagtgtactaatcagacaagtttggtctttaacatctcggagaatttatgatacatcaagtaagggtcgttgacagcatgtgacgttaggaaaaatacagtcaaatttaaaacttttcatcgaatcttactttagagatattgcgcaaggcagatagttcttcaaaatttcaacacttagaaaagcaaacctctggcttctgattgatctttttttccccgaacgtctcattttgtatttgccacctagcccttcacatcatccaaccacatgcttctgcatcgaaattcaagcagttcaaacttgtgatactttagtatgatagacttacaatgcatcgtctcaatgtgaataaagcaataactcttacatacataagaatgacagagttacctctttttgagagatgtttcttgtcaaccttacaagtaagctataatacaaaatcattataagactcgtatcaaactatcagaatgtcgaaacatgaccataaggctatatgatagcaaacgttactcagaggtttgaaatgcttttcgatgcaatagtatgatgttgaaattttatcctacatccaaccgtaatactacatgatggtgcaattttatcctagtccttacatgatgttgggcatttttcctcccttgtttggatttttgatcggcatggacaaagtgttaatgctggttattatgacctgactctatatttggcgaggcagcgaagccggtatgaggaattactttgcccgacgctgcgaaaatttatagataggggttagatgcttttgttccgccaaagggaagcacgacgttccctcaaatgagatgtgcgaacactctcgttggttgcctagctgtccggacgccgcagttagtgtatgtgcaagagcatcgaatgtctatctatgataccgattcctaagattctaggtttgatctggcatcgcagtcttgttatactacatgatgtttgaattttgtcctgatgcgtcacatgatattaagcattttcacacatcggggtaattttatcctgttgctaaatttcgtaggaaaaaaacatgatgttggaattttgtcctgatgtatttttctcctaccatctgtgaaattgctatcaatgcaaaaggtcaaaattgtaaattgtctctcgtcactatgctttctctcctaattccccacagtaggaaaaaaaaaacaacatgatgctaacatgatgttggaattttctcctaaattagtaatataatacattacatgttgttgaacattttctcctactggtctgatagcaaagtaattctacttcagtgtccaatgtggggggggggggggggggggggaacttctcctgttacagtatgatgatagtataaggaatgtcaaaacattgtatccatgtatgcctggacaaatttgccgacactgtccacattcaaggttttttagtattcctaggaaagctaatgtatgatagcatcactggctttgtatgattttggacaatgctggagaaacctctcctaatacaaaatgatgatacataagaaatgtcaaagcattgtatccttgtatgtacaggacacattttcaaaaacagtccactttgatagttttacgttatatgtaggatttcatgtttggtcaaacagcatcagtgacagtatgtgatattgtctgatgtggcagagacagatttcctaaagtggtccatactcgttgttttttagtattaatggaaaagttggcatagagcatttcaagttaccgtggggaacgtcaaaccgtcgtaggatatgcgatcaaatccctgagcagattcatttttggttcgattgtctcacaatcgatccaaagttaacaatgcagaaatttccttactgcaaactgaacaaaatagtgcggaaagtagttccatgtcatagattaagtcaaccatcacaatatgattattctggcacgactgtattttcagctgccgaacgtccaaaataagaaattcttaacgtatttttcaatttttattatatacatttctgttgtgtatttctgactgcagtaacatattaatgcacggaaactaggtcaccggcaaacctacgatgccagctttgcttgcagcacagcctgatatttaagacgttgtttaaagattacagctagcctagaagagtcttttttgtagcgattttgatggtagcatcgataagattttattgaactgattatcggggcaagggacagttaatttgaaa

SEQ ID NO: 4922 - protein, 151 aa, Mercenaria mercenaria
MSTFFKLKLYENEIRAPAYDEDMSNIISAAKILLEENQSGNEIETVSDDDDELLDIISPTTLKSKGIRGLRKLKSYTKPSSTVTLSETEWENGENELLVAHRRELSKSKQDARDELLLCTICLSAQKDHTLMPCGYTFCKHCVKKINSKCY

SEQ ID NO: 4923 - DNA, 18375 bp, Mercenaria mercenaria
  source 1..18375: mol_type = other DNA
gtgaaagtaggtcactagatcaatttcaatgacgaaatgtgaaagtaggtcactaggtcaaaatcaaggtcaaattacacttcagaacacaaatttatgcatgtggtccaaatttaaagcctgtaccttcaaaaatgtggaagtaggtcactaggtcaatgtcaaggtcaaagtttgtttcagtacacaatcctatgcatgtggtctaaatttgaagcctgtagctacagaaatgtgaaagtaggtcactaggtcaatcttaaggtcaaagttcatttcggtacacaaaactatgcatgtggtccaaatctgaaggctgtagctcgagaaatgtgaaagtaagtcactaggtcaaaatcaaggtcaaattttatttcggaacacagaactatgcatgtgttccaaatttgaagcttgtaccttcaaaaatgtgaaagtaggtcactaggtcaatgtaaaggtcaaagtttgtttcggtacacaaaactatacatgtggtccaaatttgaaggctgtagcttgagaaatgtgaaagtaggtcagtaggtcaaaatcaaggtcaaattccaatttggaacacaaaactatgcatgtggtccaaatttgcagcctgtaccttcaaaaatgtgaaagaaggtcactaggtcaaagtcaaggtcaaatttttttcagtgcacaaaactatgcaagtggtccaaatttgaaggctgtagctacagaaatgtaaaagtaggtcactaggtcaaaatcaaggtcaactcatgtcaaggttcatcttgccactcaaaaccatacatgtaatccaaatttgaatgttgtaggttattcacaagaagattttaaaatcttttccctatataagtctatatgaaccatgtgaccccccagggcggggccatatttgaccctagggggataatttgaacaaacttggtagagaaccactagatgatgctacattacaaatgccaaagccctaggctttgtggtttggacaagaagattttcaacgtttttccttatgtaagtctatgtaaaccatgtgacccccggggcggagccatatttgaccctagggggataatttgaacaatcttagtagaagaccactagatgctgtcatatacaaattatcaaagccctaggccctgtggttttgaacaagaggcttttcaaagtttttccctatataagtctatataaaccatgtgacccccggggcggggccatattagaccccaaggaaatattttgaatcatcttggtagaggaccactagatgatgcttcataccaaatatcaaagccctaggctctgtggttttggacaagaagattttcaaagtttttccctatataaatctatgtaaattatagaaataaacaaagggccataacttactaaaaaattgttgaaccattctgattttcagggggacaaaacaagggtaccaatacatcattctgacaaagtttggtcaaaatcccccatgtagtttctgaggagatgcgataacgagaaattgttaacggacggaaggacggacggacggactgacggacggacggacggaaggacgacggaccacggacgcagagtgatttgaatagcccaccatctgatgatggtgggctaataaaatacaagagatcacagagtgatcttggcgcccaccaatgtgccatttttgagtgttccaaatttcaagacttactgactagctcaaggtcaaatttcagttccgtacacaacactctgcatgtggtccaaattcgaaagctgtagcttgagaaatgtgaaagtaggtcactagatcaatttcaaggacgaaatgtgaaagtaggtcactaggtcaaaatcaaggtcaaattacacttcagaacacaaatttatgcatgtggtccaaatttaaagcctgtaccttcaaaaatgtgaaagtaggtcactaggtcaatgtcaaggtcaaagtttgtttcggtacacaatcctatgcatgtggtctaaatttgaagcctgtagctacagaaatgtgaaagtaggtcactaggtcaatcttaaggtcaaagttcatttcggtacacaaaactatgcatgtggtccaaatttgaaggctgtagctcgagaaatgtgaaagtaggtcactaggtcaaaatcaaggtcaaattttatttcggaacacagaactatgcatgcgttccaaatttgaagcctgtaccttcaaaaatgtgaaagtaggtcactaggtcaatgtaaaggtcaaagtttgtttcggtacacaaaactatgcatgtggtccaaatttgaaggctgtagcttgagaaatgtgaaagtaggtcagtaggtcaaaatcaaggtcaaattccaattcggaacacaaaactatgcatgtggtccaaatttgaagcctgtaccttcaaaaatgtgaaagtaggtcactaggtcaaagtcaaggtcaaagtttttttcagtgcacaaaactatgcaagtggtccaaatttgaaggctgtagctacagaaatgtgaaagtaggtcactaggtcaaaatcaaggtcaactcatgtcaaggttcatcttgccactcaaaaccatacatgtggtccaaatttgaatgttgcaggttattgacaagaaaattttaaaatctttttcctatataagtctatatgaaccatgtgaccccccagggcggggccatatttgactctagggggataatttgaacaaacttggtagagaaccactagatgatgctacattacaaatgccaaagccctaggctttgtggtttggacaagaaaattttcaacgtttttccctatgtaagtctatgtaaaccatgtgacccacggggcggagccatatttgaccctagggggataatttgaacaatcttagtagaagaccactagatgatgtcatatacaaaatatcaaagccctaggccctgtggttttgaacaagaggtttttcaaagtttttccctatataagtctatataaaccatgtgacccccggggcggggccatattagaccccaaggaaatattttgaataatcttggtagaggaccactagatgatgcttcataccaaatatcaaagccctaggctctgtggttttggacaagaagattttcaaagtttttccctatataaatctatgtaaattatagaaataaacaaagggccataacttactaaaaaattgttgaaccagtctgattttcagggggacacaactagggtaccaatacatcattctgacaaagtttggtcaaaatcccccaggtagtttctgaggagatgggataacgagaaattgttaacggacggaaggacggacggactgacggacggacggacggacggaaggacgacggaccacggacgcagagtgatttgaatagcccaccatctggtgatggtgggctaaaaacatacccatgtttttcatcgaatccaaaaactcggattcatagatgatggtctgaaacccgacattttcaaacccctttatttgtctggtagcagattcaattggctcgaattttctgtcaagatagcctttcatgtattcgttgaatagagataataagtctgtcgcggatgaacatcgtatatctttagaatgatttctggatatgtggtgaattcatcagtgtgtaattgtgtagaatcaactgtcttattcaacgcttttttggaacatataagtaagcatcagacagataaaaacattctgactccattggcaatttctgatccgtatatggataaaagtctctataaataaagaaacaatgagaatgaaattgactctaaaataaaagacaattatcatgctttgttataaaattactttttattacaaacagtaattgcaatgaaaccgacttcggcaatgaattatagtacttaaattatgtaatgttatttttcctttattttgaatgctatgattatatgtctattgtaatacactctcacagtctgaagaatttatttgatcatgttgttactagcaaataaaagtaattgttgtttttgtaaattgaactcaccaaatacgggattttacggttatgccaaaaccatatttcgctctcagactcagttcccatacttgaggaataagttttgtgaaatctgaaataaatcaaaattttcttttgctacatttgacaataaatacaaaaaaaaaacatcattataaaaattacatttttattacattcttataattatatctacatatatataccggtatacgttctttatttcgaggtaatatcttatgtcccattgtgtgcgactcgtcttacatataaataagcatagcgggttgcttttttaaaaaaaaaatgagaataaaatataatttgataaaataattttaatttaaaacatgtatttttaaaattactaatttttttatcaggcatgaaggagtatggccattatactcactctatcataaattataaacttaattgaatatcagtataacaagtacttgaaaacactttagatttgtacttattgcggcaatgatctcggaccaatgagcgtaaaaattagcaatgccctgtgtttgcatcgagggaaaaatatttgtgggaaaaggactgagtacaattattttgaacttgtttctttttgttgagtatatatgtatttcttattgcaaaatcgcggtttgattaatttctgcaacgtaattaaaaagatctgaagaacaaagaacgtgtgttttcttcgaaaatgaaatttgttgcttaacatgtatacatcggtcttgaaatgaaatggttgtatccacaataaatgcaaacaaacaacataaaaatagcacatctatcagtggtgagggacttgctgaaatgttcccatgcataaagcatatcgcgcaatagttaagaagagagttatgaaaaatatttaaagtggaagtttatctctaactcgcagtgttcagcagaattaaagggtgtggatcaatgttttactgactaactcttttgacccgaagacatttttgcactggatttagcatgagcgaaatccgtgacaaaaaaaaaatatcttcgatccctctgactctcttggaatcaagtgggccagaatcaaacccgaaaaaaatcttataccgggaatggaaaaaagtgccaagtatttaaacataatgtttctcgcgccattgatatttttatgagttttgtagtcacaactttcgcagtaaaatatttcattttcaccaagtttcttagtttgcaatctgtaattaccacaggtcatggaagtgtaccgttcgtcttgaacaatcgcttcacagtctgtgtaacaacctttgcctgaatttgtaatgctgctagaagagcatatctctgtaagctcttctggctaaatgatcgggtctatctttttttactatagaggacaccgttattatacccagaacgataagcttgtactttttgaccagataagaaaacagtttcagacgcacgtcgttcacgtacattttcaatttgaaatgaagttgttgtttttttcaatggcccgagtctgtgctttctgtcgggcgaacgatagcaaatgatgtaatctatctattttttatcgtgtaattggccgatctcccttttatcgtgtccgacttgaaaggccttaaaaacatgactgtgagaaaaaggtttcatgtttgaaatgcttaaatgtacaacatctgaaaccaaccgacataagacgctaaaacgtgtcaatttatgacaaatcaaacatctattttaattttgtttagaaaaaaaaatggaacttaacctttaagcttcggtcggaaataactccttaaatttgtatataacgcattagcaagttgtatcctatcatgatctctatagcggggttagataagaaacgctataattaaccaagtacaggggttatatattttttggtttgttttgttacatataatataacgagcactatgttatttacagtgtcgtttatgcatgtcacgtatacatataaattattttcaaaaccactaaaatgcttaacatataatatagatgacagataatggtaaaaattcagaaactgaggcaaaatgtgtctaatatatgcttgacaaaggcaatacatgatattctttattcgcttctaattcataaaatatagttatgatatttgacttttttatagcaaaactgtacacaagagatctgttttcttttccagcatttgaacgagctaacacttgtcagctatattctaaatatcatacataatcacatatctgcatcactttttggtaaacataaatgtctaacaagagctgtccgtaagacagctcgctccactattcggggatttgacagtaaaatgaatatatgtctgaataaaaggcctacttcaaaaggaagatacaccaaggggcatatttccatcaaatacattaatctgagtttgtaaaaaatttaagtgtaaaaggggaataatccggtcaaaaatacaaatcagagttatggggattgttaccacacatgcagatgatgatgataaagatacatttcaagtttcaagtcattatcttgtattgcattaaagttatatctagaaagcgaagattgcaaaaaagtttaggtacaaaaggggcataattctgtcaaaaacacaattagagttatggggtatgtagccacacatgcagatgattataaacaaatactttttatttcaagtcattatattttaaagtaccaaagatatgtctataaacgaagctctcgaaaaaatttaacaagaaaataattcaaattataacttcttggtaacctttaccttgggtacaatgggcccagcacctgcgcatactttgtttgtatgctggataatgtttatgtgaagtaacagcaagctataagcaatagtaacaaagatatgacagaaaaacaagggttgccgaaaaactttaaccttaaaaataacctaagtataagaccttggtgaccttgaccttgggtataatgggcttagcccctacccatactttgtttgcatactggacaatgtttatgtgaagtaacagtaagatataagcaatagtaacaaagttatgacagaaaaacaaaggttgccgaaaaactttaacctaaaaaataacctaagcataacagcctggtgaccttgaccttgggtataatgggctcagcccctacacatatattgtttgtatactggacaatgtttatgtgaagttacagtaagacataagcaatagtaacaaagatatgacagaacaagggggtcatgatgaccctggatcgctcaccagagtaatatgagctacatgtttcaaatgtcaaactgatgatttttagattttttttggaaaattttccgatgtacaatcaagtaacccctgggacggggtcaatttctccccgggggtcgtgatttgaacaaagtttgtagaagtctactaggcaatgttacatatcgagtatctaagatctaggccttctggtttattttaagcaaatttatgaagatttccctatatacaatcaagtaacctctgggactgtgtcagtttgaccttgggggtcaagatttgaacaaattttgtagaggtctactaggcaatgctaaatgtcaaatatctaagctctagactttctggtttatttttagaaatttttgaagatttttctatgtacaattaagtaaccccatggggcgggtctaatttgaccccgggggtcatgatttgaagaaattttgcagaagtctactaggcaatgcaacatgtcaaatatctaagatctaggcctcctggtttatttttagaaattttttgaagattttcctatgttaaatcaagtgacccctggggcggggtaaattttgaccccggggtcatgatttaaacaactttagtagaggtccactaggcaatgtttcagaccaaataaatctaagctctagggcttctggtttttgagaagaagatttttaaagagtttcctttcggttgccatggcaaccagagttctgcatggaattcaattctttgaacactttttaaagaaaactgtccatggaacatccctgtgaagtttcataaaaattggcctagtggtttaggcggagatgttgtttaaagggaagtgtggacggacggacgccggacggtgagcgatcgcaatagctcaccccgagcactttgtgctcaggtgagctcaaaacaaaggttgccgaaaaacttaaatcaagaagggtcacgccgtcgccgacgccgacgccggggcgagtagtatagccctcttattctccaatagaggagctaaaaaaggaacaaatttcattttcggaacgcttagatattcggatgaacaccacattccgcggaagagaaaatattatgtatgattcactacagcttatgtccttttcttaatccacagtcggttagttttgaacgtcttcaactttgtcggcgctgaaaaaaatggcgggattcattatttgccatgtaactcaaatcccgaaatatcaaaataaattcgcttctttttttaataataaccgtatcagtaacgccgatattaatattttttgatgtactgtaaactatgtagagataataaataataataaataaacacaaaccttatacatgtagttgctggattccagctgaatggaggctcattcagctcttcctcccagttaacgatggacggcacttcaaaagttggaagccgcctctcttgttttttcaataaatccagaatgctttgtaccatgtcttgaagccttttattttctaatagtaatagattagtattactagtcatcttgagtctctgggcggcatcccggtttacttgttccctggtctttcgtgacggtatttttcgcccagatatctgataatatatataattttgttaaggtattattcggcaaaataaatattgccctttttcagtcaacacttagttcactcatatactttcccattcatagtcctaaaggtcagtgcttcgttgtgaacagacgcacataaatgaattctataagtagataaaattatttatgtcattgttgtacatttggggcaaatcgatcccattctgaattatgttaatttatgtactacggtaaaagccaatcacggaattccttttatcacgtgataccgttgaaccaatctggaaacggcatcttccttcttcggcagcattcaagagtaaatagcatgcttctttctttaattttattttggctaatttctggatttatcttatccccctctcccattctacatcctctttcaagtggtaattttctaattttgaaagatttctcttaatatgcaaattcatatacatttcttgatatgctttcggcggttttatccgcgatataggtaaatatatatagtgttatttgttatggtattgggctgtaacttcattcagatatgagaacatatctatttgttaagggctgtatttttcgcccagatgtgtgaaaatataaatttgttaaggtattgttcggcggtatttttcacccagatatgtgaaattatatatttgttaatgtattgttcgacaaaggcggtatttttcgcctagatatgtgaacatatatatttgttaaggtatcattcggcaaaataaatattgctctttttcagtcaacactttattcactcatatattttcccatacatagtcctcagggccagtgcttcgttgtgaacagatgcgcataaaaagatagtaccagagatcattcaataacatcctattcgcttgacaaggggtatttttcatgtattaagatagactgggtgccgagtcgggtttctggcgtttgctcggtttcttgttgttgtcggacgatagtcccgcaatctcgtccatcgcatgcattactgatccgataaccttgtcaggctcaacattccttttcattattctgttgtattttcgctgttttgtcattgtgtcgtcataatccatctgtttcttggccgacttctgttgtgttcttttctcagcgcgtttttcaagtcgattaatgacttagttggctttttctataaacctataattctcttatgtatttaatggacgtgtattaaagtaaaactgttcatatttgctcgtagatacgattttttcatagtcctctaacagatgtttatcatcaatataccggtccttccaatatctgccaaattttccgccgggctcgtaaaacatcattgaaactaaactaccatcggtgtgttggtatctccgcatggcttgataaattctatctcttaagtttttcatcgaattcggtacccgtcgttatagtatcatcatcgtatagtctttcggtataacgatctttatgaggatatttgatcgcccatttgacgacactgtgtaacgcgagatacggatctgagtacagtccagtagtccatggtttcttttcaggaaggtatttttcgcataattcgtaaaaaatcagataagactttctgtctccgtatagagcgtaaaaagtctctttgaaagtaattttgggtatttcttcacggccatgctttatggcttatgtattggaacaattgaatatttctactcataatatttcccagatattttcatcatcaatatcatataactgtttgattatagcgtctgaagatagtttcaaatacttttccataatttttatttctgaagaacaaaacacctccatttaaagggagaaaaaatatttgagcgtaaatacttatctttataactgagagagagagacgtgatgaaatttcaacatcctcctgactcagcattttttatttgctcgggtcctataatacttaattttcctcttaatatcattcttgatgtgttgctagttttcacatgatacggctcaccgaggaatgtcgtaaacatatacagccctctctctgaagtgttttctcaagtgctttgtacagcgattataacgcatgtagataaatgcgtgttatttagatttaaacacgcatttctttgctcttcaaaaggtcacagggcttgtttttgtgttttgaaagcacccggtgttgctgaaattgatagcgataattcaacattttgcatgattctttgcttttttttcttataaataccaactaaagtatacaataaaggcagtttattctttttacagattttattatatacataatatcttaaagaattacagaaagacacatattttttattattttgattaacattttgacgaattacatatatcttatgtatttcctctgcatctggaaaatgtgaccacatatggatagtatccaacaaccacatgtgtatagtatccaacatccatagagctgtaaatgacagaacggctcaagaccttcttaggggggtgtggacatttgtgaagtatatctaaaagatttcccacaggaatttctttgcggtaattctccgagaaaaaaaatgcaatacttgctcgcaataaaaattaccagattagggaataaatgtcgggatggcacatggataagatgcaatatcaaactacggccgaatttcagaactatggcctcttaggcccaaagaacaggtctaacttctaaaccagcaaaaagtggtgaacaatcaccaggacaacgagctagtcgcatgaggatgtctataatatagccacacagaaagatgtgtgtgagatgattaaaaataatagagggttgcacaatatacgccacaccctaacactccgaaatcagaaactgtaaatgactctgtacatacggcaagggccgcacaagatttaactcattcaacccgagtgacacgttatctcatcttatgtcggaatgagcatacatgaaatgtttcatcattaaataatgagtaatttttttttttcaaaaacacctataaaaaagggcgataatgtatttttttttcattttgaaagaaaagtcgcgaaccgactactttatagaaggcggcgtttgtcaatgatcgcgcgacgttcatactcctagatcgtcaaattaaaaatgctcgacctgaaatgcgaaatctcgacggctgaaccaactcactattccgatcaaaagttaaaatcaaaatatcctaaaacggaagataagtgtatgtttatattttctgtcggtattagaccgacctctaatcagaaaaaggactttcaatcggatgctcaaagtgagcaatcacgcctacaattggtgtaattacttagggaaaaaggcttcaaaccgaagcagttcgacttgcaaaagtggtcgctaaaactaactcgatagacgttccggcctagtacaggctgtcgggagacgactagtttttcgctaataaaatgccgtctatcaagttgaccgcttgtaagaaattttgtaccatgtataaacccgctcagaccaaccagaaaaaggcccgggttactcttgaaaataaagataccactaaattacgcgaaggcagaaattatttgttagattactaacggaaaaagatatcgccgccgaacgcgtgaggctatgtagaatagcgttgatagcggtcaatttctctaaagattggaaagataggtttctaagactttccaagcacgtatctaagatacctccattgagtctcgatatgaaggtgtgtaaaagagctaatggcaaattcgtttcacaaataccttgcgattcattgtactcgaggaacatacgtgtccacgcttcggattctctgttctatcgatcccggaggtagaacgttcggcacttgttacgatcctagcaatcttaaagcgtttcaagtcggacacgaggcagacaagaaaagtttattctcaccttccacgatagaatcgatcgcgttcaccgtctattgtcgtatgcccgacagaaaaatcaatcgcaagccgtgctagacagaatcggacaactgaaaaatcttcatttgaaattgaaaacgtacgtgaaagacacgcacctaaaactgtgttctaatctggtcgaaaattacaagcttatcgttttaggtaaaataacggtctcctttatagtgaagaaagatcatttagctagaaaagctaacagagactgctctgttgacagcaatataagtttaggcaaaggttgtttcatagagttttggggaggatagagaagccgttatccaagacgaacggtacacttccaagacctgcggcaattgcggattgcaaaataacaacctgggtggaaatgaaacgtttcgttgcgaaaattgcgactacaaaacaactcacagagatgtaaatggcatgagaaacattctatctaagtatgctttcagagtttgctttaatgttcagtctatggcaaatgttgttctcgggtcgaaaagttaaaatattattagatttcctagatttgaatcacttttgtcgagtcagggaatcatttctttcccctaattattcattttacaggcatagaaattagcttgaagtttgaaaactaacaacgaggaaaaggaaattgttggtatgttcataatcaaacgaaactgctatagaagacttgaatactttcacatgcacggcgcaacgcctacaaaattctctttgtctaaaaatagcaattgtaacagaggataattataagtgtttaatactcaaaagtgtttctttcttcttttttttgtgcgcacgtttatcctattgatttgtttttccttctttctttagaactcgaaaacacttgttcgaattcatttctgcagcgtaatcaaaagactgatttgtacctatttttaacaatctttcttatacatagattttctaaagttctaattacgtaatagttaacaaagattacagagtaattttcatatcacgactgaacttaatgtgtacctttggaaagaaaatgttaattaaaattgataggagttcaagttagaaacgccccctaaactaatgttttcgggatttggatattggtgcctcaaatattgctgactaagccagaactcttagtgcacgcacttctgaagacattaacgtgcaatacaaatgacatctgactttgaaaagaaacacgttttcagatttacatatggaatgccttctgcacaaagcgcattggcaatattatatgtgtgaaactgcataaaagttacgtttgaagggaagcaacttaataattgaagcgtaaaaaagcttaaaaaattgcctttcgcgtgtcatagtattatgcggtttgcgtttaaagggaagcaaaacgtgccgttttatgtataaacaacgccgctgttattatctttcttgcgtaaagcggtgtacttttgtgaactattttagacagcaaaagtatgcactttaaaatcaaatagtcaattaagcttttctgatttcttttcatcaattgactaaatcagtatgtaaaaaaaaattcattagtggataaaacctgaactggaactgtacaaatatcatttagggaaaaacatattacaaaaggacctttttagaaaaccaatatatacaaggtgattgcaaaacgccgacagttatacatgggggcttaatagtctacatgttaaagttatgaatggattttgtgaaaggtaggtaatttcatataacgttttacttttttgccctatctctattatcaaacataattgatatatcttttggattagttcctgaatatacgttaaaactatttcaccaaagatatttgtaaagaaatagtgttttttttaacctcggagataagatttgatacttatttgtatttttccccagaaactgtcagatatggatatacacataactgcatatgtgaataattacaaaataaaagttacttttcatgtataaatatcgtgttgtttctttccactgtatgtatcgccgtgtatctgtgttatggtgtgcaacattgccggtctattccgaatgttgtgtaaaacacagtttattttgataatcaattttagacgaaatattttccctctagatcgcttggcaaatagttcacgtggaaaaatgttttcgtctaagtcgattctaaatatattataacctgctaaatatgcttgaaaaaatggcggagtgtgtattgaaaactgtacacaattgacatatattggatatcagaggttttaaaggtaaatttaaacgataaattactagaatgtgataaataacggtaggctaaactgtttaaacctgtgtacatcgtatattttacgtgtgagaaaattctacattctactgtttagggcccttttagacgttacaatgcagattggaaatgaaatgtaaaataatgaacgttgaaggtaaaatgagcatgtacacggctaatattttggactacggggcctgatttggtatgcgatgaaaggaccaatttcttttcttgtaagatgaaaataaatgaaacacaaaattgtacagtgatgtgttgatctattatacaaaatgttcaataacaaatcatacagtgccgtgttcgtttcttttaaagattcagccgttgaaataggataaggatccctacagcctaagtgcattcaatcaaaatcatttcaacagaatgattgaaactaacgtcaattttcaattctgtcctacttttatgtaattcataaataattattgataacacaccgaattttgtcacatttcctgggaggatatagaaatatctatcgcaatgcattattgtattatttacttaataaaagatatcgttgtcatctcgcttaataagaacgtgctaggttattcaccactaaattcagccattctctcttcgacatttttctagcatattttaaggagtacttatgtaacattcgcatttgaataaagccctaagattttgaaaagggagtcaattaaatcttttactgttctgtacagtatagtgaaaaaaataagttctcgggcagtttttaacatttttatttgtgatttcaccgtattataatagctacataataatatcgtccggtattgttaatgtttattttacttcatgctgaacttctagtcaatacaccctctttttgactaaaaaaatgtcaaagtattgaaagtctggtgggcttgttcagtccgtaagtttcacctttacacttgattttacttttgcattacattagtaacacttgctgtttatcttttttacacagtgtttacaaaaagtatagccacacggcattagtgtgtgatctttctgtgccgacaagcatattgtacacaataacagttcgtcccttgcgtcttgctttgatttggacaattctctccgatgagccacgagcaactcgttttccccattttcccattccgtttcggacaatgtaaccgttgatgaaggttttgtataggatttcagcttgcgtagtcccctgatgcctttcgatttcagagtcgtagggctaatgatatctagaagttcgtcgtcatcatcgctaactgtttctgtttattaggaaaaacaatgaacgtcagcgaaacttttatcaaaaaatgtcattttaaacaagtcaaaataatacaagttggaaacaaaacattttttttcaaactcaccaatttcgttaccgctttggttttcttccaagagtattttcgcagctgatatgatattcgacatgtcctcgtcgtaagccggcgctctaatttcattttcatacaatttcaatttgaaaaatgtcgacatgctggaataaccaaggatcttgaccacaatcaaagttaatgcaagttatcacgttatcaatattttgaatcaagtgctaggctctttgcttgacaaaactgtccagatgactctcgatcataaaaacttgtgactgcactgatcgattgtctgatacggaatgacaacgcacacacaccccggaacaaaacaaaattgttttaaccaaattagaacgcttcacgcacctactatcaggttttttattacaaaagttttacttttttcagactcggattgtggacgccctgttgagatatgaagggaaatatgcaatgaaacggaccggtaattagtaaatgccaccagagttatttggagtgctacataaacaacattcatacggaatacttgacttcaagtatttaagtacctacttgaattaaaagtcgtgggatctactttattgcttgctcagaggaaaatgttgactaatcagaaacaaacacgtcgatttaattatttatttgcgtaaatatataattcgatttcattttatgttccgatagtctaggacttacaaaaagacatttaatatgagtaatccatatacggataactatcttcccagcaaggcgaatactaccaccaccgataatattttgaatatgtttagtgatgacgaagtatatacagcaacaactggattgcaaatgaagaataagatgaaaactaacaaaaagccaacgaataaaaaaaggtaagatatttttttgtatttaactgatacatcatagaatgaattactttccacaatactttttcctgtaagtaatttgaaggtttgaattatttggagcagactttgaataacattgcgatacttagtacggtggggttaacatcaaatttgtctatagagataaataatatacaattatctattctaacacgatccgcagaagttgctatataaacatatagcgaaattgcctatacatgaattaacgataaaatatagctcttccattccaccctacgattgtaacacgactgtgagattctactctgcttctgttatataccgaataaatactcgactttttcagtgctatgtagtagtaataaaaagtacatcaaattttctgaaacaaacaatatctaagtgatgaatttatttgttcatatttttaccgtaagaaactgtttcagcccggtttcaacttccaacatcagttcatctatgtctggtcgtgtgtgtagtttaccatttctgcgttgtaggcaccacaaatttcaactagattctactttgacagtaaataaattataatttatgttccaatcttccagactcaagtgtttacgtgtttatatgccgccgcaatgttctggcgtgtatgcttcagtgccatcatgtaggtgacgtgcactatttttagaaactgcatatataaactttgaatgaagtatttacttttgatgtctatatccgaccttagatgttattgaaaataacatttttacagcagtaactacttaatactttaattatattttgctgaatatcggaaaattccgttttatgcaacgctttcattcgtggggaggtttttataatag

SEQ ID NO: 4924 - DNA, 10692 bp, Mercenaria mercenaria
  source 1..10692: mol_type = other DNA
catatcacagacacacaaaaatcattaaaaggagtaaactttctcctttaaattacataatcacaattcattcgttgaatataaatacgcaacattcctattataaagcaatgacaaaagtctgatagaaaaaagatccagaacacttctaaaacaatacagattgtagtcgttgaaaagtaattctgtttatagcatcagagaagacactactatgatataacagaccaagtttaattcagtttcatcatgcatctatgaggaaaagttgtttaaagatttttttttactattttagatctagttgtccccaaaaagtgcgaagtgccatcatttgaagaaaactgggagagaaattataatgatgctacagaccatgtatatatcttagtccaaaacggatgatcttctctaaattttacaattcgatcatccgaacgtttagacaagtacaatataaaactattaacttttctttttacatgaattctgtcagaaaacagaatgttacatacggaaaatcaatcttacttgaacaattgttttgctatgaattaacattgacccctgaaaatagacgtactatcacaatttccttaagtacaattaacggtaatctatcgaatattctttaatataaatgccatcaaagtcattttcagacatcttgttttgaaggttgagcatagcagttggattgtttagtgcttatttatcacgggaaagtgaacatgccatattatctcttaagatattcataaaatgattcttaatcaaatcagtttggccagagaagcataaagcgactgaaataaatctgtattagtttcagtgaaagaggaatttattgtactttgcttccaatcaagatgtcatggcggaatttcaggaatgccagtggaacttttgatgagtgaattgttgttaggatagattataagtacccccgagattcattatttttactttgtacatttgtactttcatttccagtcaccgatccgcatttatgccatttgactaaataataatataaggacgtataactcttctatcattgaactaacccttacaaatctatacataatgctgatcgtttaattagatatctacaaagattactcttggggttgggaaagggagttggggtgtataaatacagaattgtactaaaattctgaaggtgcttaaacataattcctttctccatacatattatagttacggtaaatttattatcttagtcattcatgatctttaagctattgaccattttctgggcctttaaatatgataatagagtacatacaagtagcatacaatacagttctcatacgcgcaattattacaattgttataatccagtatgtacttaacgcgacatcagtcaactcgtgactgataccacattgcagtcagccgctaattgacactgtatataacgattgtcagacaaataaaaacattttataaatgctaacttatataagagctaggatatcgcttgatttaattataagcacaattgcaaagaagcatatgctagtaatggagacaattatttgtcgtatggtaaaatactgaataaagagattcaagattccagtaagagcaggaacaaaagtgatttttaaagctacctatcatggagttttcaaccttttacgcaaatatctcatgaaagtcataacggtacctcttttattaaaacgtttgaaagtttatcaaatacagattgatagtttccatgacttagaaacttaccaagtctgtaaacaatatttgcataaaagtcaggatttagtacattgtccaagaaatgtctttagattactattagtttatactaaattatttaagctcgattgtgacgaaagcttcaaacttttttgaaccactgtcgagtccgcctcctggaaaaccagtattgaatcacatacatcaatatttgcgaggaaagattgttatgatgctacatcatctcaatatttaatatatctttatattataagaagatcagtatgagccagggtacctaacggaataggcatgactcatcaaatttgctaatattgttaatgtgttcttaaccccgccacagagttataagcattagttgaaaacaatgaccagaaaatcatcccacttttttcattatcatgcgtaaaattaataatattcaaccgttgttcgcattcatgaacgaatgtgcatcaatggtatcgtttttatttgtacaaatccttccaaagtatgacaaatgaaatactagttttaactttagaactttttgtccaatagctgtttccactgacataatgtacaatgcttttacattaggaagtatttatttcaagatttatcattgtgtttacagcgctgtgaagaaaataacagatgcagtaatggtataatgattgatctggcaaagcagagctttgtctgtgatacagttctatttcaaagttatttgtaatgtactggacacgataaccatacaccattttatcttatttttaacaaagtttgccacttggctgtataccaatggtctgtaaattttacacgaaaattgttcatttgttgctgtttaccagaatgatgctataagccaatcaaatgagaaaatggtaaatgtgcacaataataatgaacatgttgttacatagacaatataagtgatttttgcgtaaatcttttcctaaggtggcgattttatattttagttacaaaaatgcatgccatcaaagaccccacatttttgtgatatgcatattgatgatagagtttttttttttaaacttttgttgaaagatgttgtttcactaaagtacatatttctccatatgaatttataaaacagtgcttctgaaagacatacttaagcagtcaagcatacttctttagccagcaaaagtgatccggtaatctgatgcaatgctcagcattttacagtcttggtaaaaattgatttgtctgcaaacaatctttcaaaatacaatgagcaagagacccgacaacgtttgctaaatttatgagattaacatataaaggaaatatcttcgcgatatttgtactgctaaaatgaaacatgtgacaaaagtgacaacaatgaagcaaccaaagtcattgcaagttgtattaagaaaatgcccctgtttgtaatttccctaaacaaatgtgaatataccgcaaaggtaagtatcgttgtataaggtgtgtttagattgtaacattgactataacacatatacaggcaacacatccaaaaccctttgaaatatagcggattttgtctaggtttaacattactctgaacagttataggtcacatgataactttctatattttgatgcatattcgcaggcacgggcgaatatcttggtagaaccaccaaacgtccatacgccagctgctttgtctcctgacacgatagaattatacagctcaagtaatgtttcaaggttttctacatgaagaaatgttatttaactccaacaaagtgtgtataaagtaagttttctttataccatttggataacaaatatacatgaaatgttatatttaataaacccaaatgggtttcggaaatagatgtgaattgaaatgggtgtttgtgtgggaaggtatggtgttgaaaattgatatttgtgcgggaaaagaggagaaatgggtgtgaaagtgacaaaagtacctgttgttttttgtttgtttgtttgtttgtttttattttatctaggaacatagtgaggcagcgccttggttgacatcaacaatggaaaagacgtaactgtgcaaagtggcgtttattcacttaccgttccaaggcggagccgcactatgttcctttatttgttagttttttttttcagtgtttgtgccgaccgttggtggcatgttgggagtgtgattctgattggtattcgtttcttacaatgtgttaaatgcatgtgagtttgtgttttttcaacgatattttgaagaaaaaaggaagagtgaaattactcgcacgataattggtggcatttggcatgcagcagggcgatatagaccagatgtttttatagtactgtaatagcttttctacagattatacgaggaacagacagactgcgctttgggagagccgtgaaagctagcaagtatcttgtagattacgacgtctcgtgtgagagtgatagagcgaaagtagaagtaactgttggtaacaaatacaatataggaaataacactcttcaaatttcgaaaccaattaagtgttgcaactttgcagaagaagacagtgaaaaggagaattcagcgagaaatgcattattttgcagccaaataattatagcataaagccctttagcattgtgtgataaccgcaacatacataaacagcagagtctgaacagcttcaacttcgtaccggtgcccattttgacacacaacggcctattttatcaacagtgatttttcattttgtctcgacgaacacttaccattcgaacgtttatgtcagatacagaatgattaatatgtctgtgctacacaaacaataatgtcagaaccatttcctttatgacttgaagtcaaattctaggtgtagacagacattcaacattgtgcccatttttgacgcaaaacagcctatttcaataatagtaaatgttcaattttctattagttgcatgagaaaactcggatctggtacagaaaggcaagtatcaatttacatacagcatcttaaggacagtaaaaataattttctgaaacacactgctgtattatgatttaacgcatacagtgattcaacaatgtgcatcaaacaataaacaatcaagaaatgaatgtttatttcgggtaacactatcctataaccaaaaaaacaagatgtcgtttatcaagcagtcgggcggctgtaagaacttttgtgccatgtgcaagtccacgcagaccaaccagaagaaatcaatttcttaggtggcactcagaaactgcagattctgtgtgatctacgcgatagatagaagtgaacacttccgactcgatatgttaccttgatccaggacgttcgcgacgtgttacgattccggcaatctaaatgtgtgtcggactagaggcagacaagaaagaggtcattcacaaattccgcgacacaatcgatcgggttcaccgtttcttgtcgagcgctcaaaagagaaagcagacgcaagctgagcaagacagaatcggacaactgaaaaaactgacgttcacttgaagctatggtcctacctcgtcaagaattgcaaactggtctttctacgtaagatatcagtttcctccatcgtgagaaaggacagaccgaaccatctagccatagaaggtaacagatactttctctgttggcaacacttcagattcagacaaagactgttacacacgttcgaggcacggactgcgatgcgatcattcaatacgaaagcttgtggcaatttcggagtggaaaacaacaaactaggtaaaaaggaaacgttttactgtgaaagttgcaactaaaaaactcatcgcgacgtcaacggagcgggacatattctgtcaaaatacttgagaatgtttccattcgccgcatacaaaaaaatgacaaaataaatgacatttgctgtccaggttgactcacctggctgactcttttagaagactcgatggcatttttgtcacatatttttcgggcagaaatgtcatcgggtcaaacgagttaacatttgcatgtttttttttttagttgacaactgagattaaagcaaaccattaatccctcgttatgctacacgaccctccctcccaggactaatcacccaagaagccggtttcgttttggataaagcattgtcaatggtagtaaaacacatatattccacattaatcttgaatattgtacaattaagtcaagctgcattccagcttaattggttgttttgtgtcaacctttgtcggcactgatcgtgaggctacaacagaatgtagatttatcttaaatactctaatgcaattttgttgaactttgcagatttttatataaattaagttgtgtgttgcatgccaaatatatgctgatccatggaaataaagattctttttaagtaaaacgtaataattgcatgttcctcacagaaatctcattttctattctgatattgaacaattttcgaataattttcgtaaaattattgtttctgtaaaatggaccgaaatttgtctgccattactacaaaactggaacttttgcctgggtgatgtgtatagctagagtcctataaaatcacacatagattgttacattgttatgtcatttcctgtttataaaaaaaaaactttataaagggtctgcttttacttttcttacagatatatttgtgaatgagcatgtactttcactttatgaattggctattatctttatcatttttttagccttggttaattacaggctccggcaaaatcaaaacgacggcttgaaataattttgtcttccagatcaccgaatatatttccatagctgtaaatttaagtattttagttgccagtttcgcaacaacagaattaaaagatcgtgtcagacatgtcaaaaaatattcgtatatgcaagaatcacaggaatggcattattaggttaaaggtacaaaaatgaataacaagtctgctcgtatatagaacatttatctgatctgccttgtgaaggcgtcgtgttgtcggaacaatactttgttttcgatattttggaaaactttatgacaacatggttttggtattattggaagcttataaaatcaacatttgcaatttcaaaatacaaacagtaatcgtaaatcattttaaaattaatttgagttagaatatatcaactatgttttatctagaaagataaatgggcggggctagataataaaagacctttgatagagcggtattgaagtttcgaaaagactgatttctagatgggcggggctagataataaaagacctttgatagagcggtattgcagtttcgaaaagactgatttctagatgggcggggctagataataaaagacctttgatagagcggtattgaagtttcgaaaagactgatttctagatgggcggggctagataataaaagacctttgatagagcggtattgcagtttcgaaaagactgatgtgggaaagcacatgtttaagtcatgccaagatcaaattagatggaataatatataataataatatctgtcatgtgtttacgaatcggatagaaatatccgtctcgagggcacctgcgcattgggcggtaatgaggcttgccgaattaccgcccatgcgcaggtgaccgagggacggatatttctatccgattcgtaaatacagatcagctcacgcggaaaacccattctactcgatcctcggaggatggccaaaacgagtactaaggctccgactcgaagtttcttcgagtcagccattttccgtcaaggaatttcgctatctgactccgaggatttatgcgaagtcactcgaaggaagtcctcgaagtgacttgagatgaaatccaattagcggaatacacacctacatttgtatattggtttcttttgtttccgagtcgcttgacggaattctttcgagtgactccgagacgaataattaattacctatacaaatttaaatgagccttcgagtaacttcgaggacatatttcagattactcggagcagggtggttatattttacatagtgatacgcgacataacacaatattttgtaaataaaaataatactgaattgtaaataaaaataatactgaagtattttatcttaccataattccttccaaatgaataaaagaaagaccactttcatgatgaaaattaatcatttcaatctccaataattttcattaattaacaaaagtcacttttctttcatggccatgatcttaatgtttatcttgtatcatatagtttgtaatttagtccattttacatcaatttatttcttaatttaatttgcactgtcagaaactctttcaatattatatttaacaaatctctatactttaacggcagttaactgaaattctgttttcttttaatttacttttctagcgggcgcaattttaacaatatattatcagtgcatgaaccactataatagttgtcattaacagcacgagagtcatctgacatggggggtgccagatgcgttttgccggcatgggtaaaatcaccggaaacgccagtccggtgtgcaagaatgacatatctcatacaaaagaaaaggtgattataagtactcgcagcactctgcattctgacatcaaaagcagatggtgtttatttgtgtataccttttgcatacttaagcgtccttgtcaaacatcttgaaaataattcaagtgcctcctaacttgctatcagttatagctccttgtttgccacaacataataaatgcaatggtcgtacagtttgtacatgcactttatttcagttttaagaactattccaatatttaaggaaagtaattattatttctctgattaagattgactgaaatgtacagtttatagaagataacttcacacatatttaaatcgttctgtgcaaactaaaaaatgaataagtagaacttattcctttttacgtatgatgagattggaactttggtaattaccctatattattgcatcttagcagcagctattgtttatatttatattttgtgagaagagctaggtctttctattttttatattaaatgttttactgcgtaactaatgccggagaagtcacaaagtagtctattttagtgcctgtataaaaatgctgcctagaacaaagagactcactatattttcaatgtttaatttactttaactttcttcacattttcgttaactttcatggctttactggtcactgtattatcacttgctatttcgtttcgggtaaaagtcaaacaaatgtgactaacaaaagttatttttcaatttattgtttttcaaaaaacaccttaaaaatagaaaaatacacagtattcaataaagctagtattttcacatcaataagagttggcaatgtttctgtcccttacttaaacgtaatacagttgtttacccccagtagaatacgtcttctttttcgtcttctttttaagtgcttctttattcactaacatattgtatattatactgataactacatttagccaagctcatatctgttatatatgacattgtcaatgtttgaccacaagcatggttagtgttacaactataaagacaaaagatatgtttgtagtatgaaaaacggcattacatgaaacaataatttgaaaactttaaaccaatttgaaaacaattttgacataaaccgtctaaaataccaaaaacgaaataaaactccgccacacagacgtctatataacatgcattatcttatgtattcccatgaagtaatcgtttgccatcaataatctttcttacgaacaaaataatatgtaggtctggaacattttcaaatcgccctacaatgacaaaatatctctctgactgtgttaaagtttccacaaaagttaaatcaaagatctacctagctgtcaaatatgggaaatgtgcaatattaatattaactaatttaacatatacaagcagacaacgtttattcctggtcgaatcagttactacgccaagacacccccggtatacattgtatttatcaattgaacttttaatcaataaacttcaatttagttttacagcgaatgaaaactttaaaacagaaagaaaaagaactaaacagaaactgagattattttcattttatttattataaaacttccgagcccgatctaaaagtttaaagagcaacatggcaataggtggtgagttgcatttgtgaagcaggggttgtaaccgttctgttaaaggtgttttttcaaaattctttcttatgaatagatgttgctgtaatattgtgcagatataagtagctatttgacttcaagatagaaacagatggtatctacacttggttttgaaataaacaatccttgaaagcaacaccgaacagtgtaattaaacatgcaaaattttagaaatggataaagcaaccttagagtcacatgtgcagctttttttatagttttgtatgtcatggcgaaacaaacgtttgcataaacatcaacaatttgcatgagcataaactacttacaaaatgtactttaaatagatcttacatgtatacctaacgattaaattcctgcatgaatgacacagttcaatgtttggaaaaaatgtcagatttgtttctcactgtaatgcacgttttatatgttaatacgaactatttctcgggatgacaaatgcaaacaatggcgtggtgacttctaccaattattatgcagtgcaggcactgtaagattctatttcgaatgagaaatcataccgaacataaaaggacgtatgccaacataaagcagtcttttctatatatataaatggtccactgacgcaagacagaaaaaactatttagaagaaacatgcaaaaacgaaaacaatcaaagaagagtattcacgaaatctaagtttagtcacacgctcaacgtaattatataaactatgtaaaatttaaggacaggtagctgggaatttatgaaacaaaactatttgtgcgatggaagaaagtaaaga

SEQ ID NO: 4925 - DNA, 10086 bp, Mercenaria mercenaria
  source 1..10086: mol_type = other DNA
accatctgtttacatgaaaggatttcttatttatgtctcccaccatacagtggtgtgggagacatattgatttactccagtgtgtgtgtgtgtgtgtgtgtgtgtgcgtgtgtgtgtgtgtgtgtcacaaagctggtctgcactctaagtcaaacattcaaacatttctcaccctatcttcaccaaacctgaacaaaatgtgtctgaccataagaccttggccaagtttaataactagccaaatcagcctaggcactttggaattatggcccttgaattaccgaaaaatccttagagcgcaatgcgctttagtgcacccaaaccaaaccctatactacttttattagtagtatatggtatgttttgggtgcaagaaagtgcatgcaaaagtagtgtatggtacattttggatccaagaaagcgcagactgacttactatttagatgactaggcagttgttggagacatgcgcttttctcaaaagcatctctagtttgacccctatgttcgctgtacatctgtgttgttattggaacttgcaaatcagttaaatttatttgtccatttttgtgatcaatatcgttatgtaaccttacaatattaacttaaacgaattttttttctcgatgattttgaacgaagacttctggtagagggtaggtgtttgaaaattgatttttaattagaaaataaaggtaaaacattatagaaaagacacccccccccccccatataaagggggtatgtgtgttggatgttaaaaatggaactagttatacgttcgataagttacatatcggaaatgatgcggataaggacagagataccattcttcatgtggcaataatatgctatatgaacgacaatgctctgacactcatcgataaaagctggttgaatattcagaactatcttcttcagactccgttgcatctcgctgtattaactggtcagatcgatatagttcaagctttgctgagcaaaggagctattgcgactcttcgcgaccacaagggaaatacgcctttacatatcgcgtgtgagaaaggcgacaggtattccgtagacgctcttgttcgatctatcagtgacatttcgcaaattcaaaattgcaaagggttaacgtgcgttcacgtggcgtccatgcgaagagagatcttcattttaggtcttttgtttcgcagaggcgctgacgtcaacattggcgatggtaaaagcggaagaacggcattacattacgccgtcgagaagaacgatataaaaatggttcgtttccttatttattattattctctaaagtgcctgctgtataatgccagaaacatagtgattttgctaaccgtgtgtgtttgtgagagcaggttattaaaaaaaaacttctgtcgtatctttgtaactttacattatccagcatactgtttatcattgagcgaaatgaaatgacaacaaaaattgaaaaataattccctatagggcatataaaggaagtcattgtggcaatgtaacatttccaaggcataaatgtgaacttcatctttcctaaaatgcatatcagaataaaaaaaaaacaagacataaataatgccagaaacatagtgattttgcttgtgtgtgtgtgtgtgtgagagcagcccttacagaagaaaaaggcctgctgcgtactcttgctgtgtacatacagcgtatatgatgcgtacatgatgtgtactgaaatcaagggctttaaatagtacacaggatatacaccgcacatacactgatagtacgtttgtagtacacttttgacatgcaaatgagctctgccgcgtactacttgctgctgtggactaccgagtacacaggatgtacgctggaggaatttagtatgcgggaaatagtacacagcatgtacgcggcacatacacttttcacatgcaaatgagcctgcggtgtactacccatgcggcgtacatgttgtgtactcctgcggcgtacatgctgtgtactcctgggccatgctgtgtactcctgcggcgtacatgctgtgtactcctgctgcatacatgctgtgtactcttgtggcgaaactgctgtgataatgtaattccttaccccaccaactttcgtatgcaaatgctgatcatttggacagaaaaaaacagaaaaaagataagtgacatgcatcaataagtatttacccttaccaaaataatgtagattgatgttatcaaataaattagtatgcttttcttcatccacttttcaatgaaataaatcaatttttgtagcatgtaatttggtaaacatttgaagaaaatggcgtaactgcatcaaggggaaacaactttaatgcgactaaatataagtgttatgatttattatagacgatgtgtgcgtagtatgtatttattttgattaaaatccatctgagaacaatcaaggactggaattatataagcatttatacacttttacatccgtaaaaagtatcgcaccaaaaaattttgtattgattttttccaatggggcgagagcaattagccaaaaacattctgaaaatacaaatccggcaaatccgatgaataactttttaatttggtgaggccttaatgagttaacataatgagcattaaagcctttataaaacatgatagaatggtgttttgcttaagagtagaatcaaataacagtgagagctattaattcttctcaatcgggcgctcttgaggcattatcttggtaattatttcatatattacaaaatgtaatgcaacgaagttcaaataaggcttttcaattatccaagttagaaagctctaggattaattcaaaatgaaaaagaatatatttttacactgcatgaaaggtgcagctcagaaatcatgtacaaatccttcctgcatgaagtgtacttcagacttttacctaaaaaaattcaaagtataaacaccaaaagaaaatgaacaagtccctcccgcatatatgaagtttacttcagactttaacttataaaaaaaaaactaagtataaatgccaaaagaaattgttcaagtcattcccgcgtatatgaagtgtactgcacaaatttcaaagtatctgcggtgtacatgcagtgtactattttcttgtacaagtctctcctgcgtacatgcagtgtactccttaaattttcagagtctttgctgcgtacttgaagtgtactagtgacctcctgcgtacatgctgtgtactcgtcataatagtacgcggcatgtacgcggcatgcggtgtatgtaaaatgtactcctctggcgtactactgtgttcgcggcatatacacagcaaatacgcagcatgtacgccacagaggcttgcttctgtaagggaggttatgtaaaaaaccttctgtcatatctttgtaactttacattgtccggtatgctataccaaggccgtgatccgcaaaggatcttgtaccgcttgctgagtattttttttccaagatgtgtgtgattcggttcaagttttttttcgtatactgtaaacattgtccggtacgcaaacaaagtgaggctgagcccattttacataaggtcaaggttactaatatgcaacctttgtttatctttgttatttttgcaagttcacataaacattaaccagcatacaagcaaagcattttgcacgagttactaatatgcaacctttgtttttctgtcatatctttgttacttttgcaagttcacataaacattaaccagcatacaagcaaagcattttgcacgaggatcaaaatagcataaaaccgatttgttttatcttactgtaaacataaagtgagactgagcccatttcaaggtcatgccaatttacaacagtaacagcactttcacgagtattcttttttttcaccaatacagtcaataagcataaatttctcgcaaatattttactgtatgttaacttttaaatagacacttttacttttcacatgtccggcaacctttgtttttctgtcatatctttgttacttttgcaagttcacataaacattatccagcaaagtatttttacgaggttttgcaagttcacatacaagcaaagtattttgcacgaggaccaaaatagcataaaaccgatttgatatatgtagagttttgtgaataaataaagcacgactttacactgtgcaatatggcctatattcatgcatatttgcaatagcgggttttatgcagaacatatctgttcacgagatagatgtattacctgtagtaaattaacatatttcgcacgaggaccaaaatagcataaaaccgatttgatatatgtcgacccacggaatactttggcaaaaattattactgctttattcttttcaactgaatgtttactttccattgtgaattaggacgaatttcccagttgaagttataaccgactttctattatgtatgccgacttgttcattttcttggcacacttattttattttaacgatatcgcattctattgcaaccaaccattccagcttttctttcatcgttttacataagaatatcccttgctcttgatcgtaatcgaattcgtcgatatgcggaacgttttttaaaataggaatttccgaatcaaatactaaagtaacatttttcgctattttactccttatgtagaatccatacggatcgtcactgatcactttagataatacgcgttgtattcccaaccaagatatttcatcttggatacttttggccgatacatgcactactagatgatcgtcagttctatgaaaaatgtctagaaccttactgatttcttcttctgtacaaagatgattcttcgtgtagaacgaatttctttttctggagtctttggaaaatacgtccgaaggttcgtatatgatataagtagacatgtttgagatgtttgatttagattcgggcaacgcgcaacatttatacttgtgacaagccaaatttgttcaaatattatctttttgttcttggttgcgctagcatatctcagttttttttttaacaccatttattgtgaaagttgcaatcacaaaactcatcgagatgtcaacggagcgagaaacattctgtgtcaactgatggactactttttcaagtattatttacagagtcaaaacacgatagtaacagatggggcagtcatatccgccgctacattttttatttctaacaaaccaacagtcttcctcgtcacattcgttgtaatactcggatttttcatttgcccagtctatattatggaaccagcgcacgtaaatacgtgcgtaacagatgcagcagtcatatccgctgcaacttttattagcaaaccaacagtctttatcgtcacattcggagttatacacgaatcgttctgcatatcgtcttgtcaggtcatattctcttataacagttcttggaatatctggaagaaagcgaagaaacaggatcataaacataacaaataacatcaatgatagaggtaccaatacgaagggattgatatcatctctcctcgtatcatgactgaagatcgtagtcggagtttttctttccatatcttgccctcctccaccttttgttgttttattaaaatccaccggttgtgatcgttgaacgccatattctaacttatctgttctatgatgaagacttttgatttcagctcgtagcgactcgagtatagtatctgtatcaccctccatgtctttgaaaaatgatgtaagaacttttattttctggtaataaaatgtaaaaatgttttgctgactaagagtaattatttttctgattgaaacacaagggtattcgttcgcaatgaaccgattttgtgcatgcacagttttgactaatcagaatgtgccatgaatcttgttaatacatcatgtaagtgcttaaaatatctgttcattttgttttagtctagacaatctattatagtaataaaaggtttagaaaccacttattcgtatgtatttcactgttaatatcctccaacaattttgtctcaaccttattttcatattgttttaccgcgttattattccaccgggtcaaattggtgattgaagtcctttttgtcgaaaatttcagaccaaaattagattggacagaaatagtctttcaggtaatcctttagaaaattcggtaatggtaactggtcgatataagatacgttatcgggatacaatcgcttgtttattgataccctgcaaagatgttgaagcgatgatacattaatccgtacaggacgtatattttcaaagcctttcatcaattcaaaaagcgaagatatcgtaaacttagaattattacattctaatacacgaggaaacacgcagcccgaacacgatttcatcatgtcccaatactcttcttctctaaaaacgaaaggaatattcgggtgcacacgttcccggtttttccatccaacctctttcatgaatacgttctgaatgtacgcatccaacatgtatgtaggaaccagtttctttccactcgttttttgtatgttcttagtttttccaggatatggtaattctttccagattactgcaaagttaatttttctatcatgtatagtttatccaatacttttcttccttgataaacgagtatcgctgttatgcacgcatccagcttcaagtaggtgcaaattttaccttgtgtaaagtttttcttaacatcattaacaaactttaagcgtcccaatactcttcttctctaaaaacgaaaggaatattcaggtgcacacgttcccgtttttttatccaacctctttcatgaatacgttctgaatgtacgcatccaacatgtatgtaggaaccagtttctttccactcgttttttgtatgttcttagtttttccaggatatggtaattctttccagattactgcaaagttaatttttctatcatgtatagtttatccaatacttttcttccttaataaacgagtattgctgttatgcaagcatccagcttcaagtaggcgccaatttttcgttgcgtaaagtttttcttaacatcattaacaaactttaagcatcccaatactcttcttctctaaaaacgaaaggaatattctggtgcacacgttcccggtttttccatccaacctctttcatgaatacgttctgaatgtacgcatccaacatgtatgtaggaaccagtttctttccactcgttttttgtatgtccaggatatggtaattctttccagattactgcaaagttaatttttctatcatgtatagtttatccaatacttttcttccttgataaacgagtatcgctgttatgcatgcatccagcttcaagtaggcgccaatttttccttgcgtaaagtttttcttaacatcattaacaaactttaagcgtcccaatactcttcttctctaaaaacaaaaggaatattcgggtgcacacgttcccggtttttttcatccaatctctttcatgaatacgttctgaatgtacgcatccaacatgtatgtaggaaccagtttctttccactcgttttttgtatgttcttagtttttccaggatatggtaattctttccagattactgcaaagttaatttttctatcatgtatagtttatccaatacttttcttccttgataaacgagtatcgctgttatgcacgcatccagcttcaagtaggcgcaaatttttccttgcgtaaagtttttcttaacatcattaacaaactttaagcgtcccaatactcttcttctctaaaaacgaaaggaatattcgggtgcacacgttcccggtttttttcatccaacctctttcatgaatacattctgaatgtacgcatccaacatgtatgtaggaaccagtttctttccactcgttttttgtatgttcttagtttttccaggatatggtaattctttcccgattactgcaaagttaatttttctatcatgtatagtttatccaatacttttcttccttgataaacgagtatcgctgtaatgcacgcatccagcttcaagcaggcgccaatttttccttgcgtaaagtttttcttaacatcattaacaaactttaagcgtcccaatactcttcttctctaaaaacgaaaggaatatttgggtgcacacgttcccggtttttccatccaacctctttcatgaatacgttctgaatgtacgcatccaacatgtatgaaggaaccagtttctttccactcgttttttatatgttcttagtttttccaggatatggtaattctttcccgattactgcaaagttaatttttctatcatgtatagtttatccaatacttttcttccttgataaacgagtatcgctgttatgcacgcatcaagcttcaagtaggcgcaaatttttccttgcgtaaagtttttcttaatatcattaacaaactttaagcgtcccaatactcttcttctctaaaaacgaaaggaatattcgggtgcacacgttcccggtttttccatccaacctctttcatgaatacgttctgaatgtacgcatccaacatgtatgtaggaaccagtttctttccacttgttttttgtatgttcttagtttttccaggatatggtaatctttccagattactgcaaagttaatttttctatcatgtatagtttatccaatacttttcttccttgataaacgagtatcgctgttatgcacgcatcaagcttcaagtaggcaccaatttttccttgcgtaaagtttttcttaacatcattaacaaactttaagcgtcccaatactcttcttctctaaaaacgaaaggaatattcgggtgcacacgttcccggtttttccatccaacctctttcatgaatacgttctgaatgtacgcatccaacatgtatgtaggaaccagtttctttccactcgatttttgtatgttcttagtttttccaggatatggtaattctttccagattactgcaaagttaatttttctatcatgtaaagtttatccaatacttttcttccttgataaacgagtatcacagttatgcacgcatccagcttcaagcaggcaccaatttttccctgcgtaaagtttttcttaacatcattaacaaactttaagcgtcccaatactcttcttctctaaaaacgaaaggaatattcgggtgcacacgttcccggtttttccatccaacctctttcatgaatacgttctgaatgtacgcatccaacatgtatgtaggaaccagtttctttccactcgttttttgtatgttcttagtttttccaggatatggtaattctttccagattactgcaaagttaatttttctatcatgtatagtttatccaatacttttcttccttgataaacgagtatcgctgttatgcacgcatccagcttcaagcaggcgccaatttgtccttgcgtaaagtttttcttaacatcattaacaaactttaagcgtcccaatactcttcttctctaaaaacgaaaggaatattcgggtgcacacgttcccggtttttccatccaacctctttcatgaatacgttctgaatgtacgcatccaacatgtatgtaggaaccagtttctttccactcgatttttgtatgttcttagtttttccaggatatggtaattctttccagattactgcaaagttaatttttctatcatgtatagtttatccaatacttttcttccttgataaacgagtatcgctgttatgcacgcatccagcttcaaggaggcgcaaatttttccttgcttaaagtttttcttaacatcattaacaaactttaagcatcccaatactcttcttctctaaaaacgaaaggaatattcgggtgcacacgttcccggtttttccatccaacctctttcatgaatactttctgaatgtacgcatccaacatgtatgtaggaaccagtttctttccactcgttttttgtatgttcttagtttttccaggatatggtaattctttccagattactgcaaagttaatttttctatcatgtatagtttatccaatacttttcttccttgataaacgagtatcgctgttatgcacgcatccagcttcaagcaggcgccaatttttccttgcataaggtttttcttaacatcattaa

SEQ ID NO: 4926 - DNA, 25860 bp, Mercenaria mercenaria
  source 1..25860: mol_type = other DNA
acataaatcagagttatcagtcatataagtcatatacatttgttgtacatgcatttagaatatttgaactgtgcctttcaagttattcttgttggagaaaacctggaggtgttaatgaaaagatacgctggtatgataacagcaggctgctgtaaattactgatatatgttaacagtttcattgaattacactgaataatcgatacttccaacgatctttttagatttatgtttaatttgattttatttgcaaatacggtctcaatacgttcactgtgcaaagaagtataaaaacagctagtgataaaataaagactgtcagaggtactaatttaccgctgagattttaatatcatcacgccagaaacagaagctgagtaggaaatagtttttgcttttctgcatagagtttaaatcacgaaagcgctttcaaatgcctatatctttctatgttttaatacgaagtttaaacttggaagctaaatcgtccttttcttttcccactgaataaacgtctcggtaaattgcacttccaagagaaattatcgctttacgatgtttgtagtgttacagatgttaagaaggtttctccgtggtcaaagtcattgacttcaattgatttgccctcatcgctgtgggctcgaaacaatgcattggttgtcgattttttttttatttgagaaagtcaccaagcttgcaatctggcctactggaggtctagccaagagtccaaaacacatgtataaaattctcagtgaaagagtaccgtaacaattgtcttgatacattgtcaaaggttatcgttgacaagtattacagaaaagtaatatcaagaaaaaagaacactattttatcaaaaagtacatcatttcagaattcctgtttaaattttactgattaggctctggtgagttcctttcaagaaaaaactaatagacagtctttactatcacttttgtaataactttaactatgatactagtatgtgtatttgagaacatttaacattcttgattcttcaataataccacgattcatttttctgtcacaagtcggcattttgttagaaattcaacaatttcaagcgatttttatgaatgcaaaagtttaagacatacagacatttgatttcagtagaactatttttttgcataaatacataatcagatttctgtgaatgtgtatttgttttgtgaattttgacgactttaaaaacgtagttcaaaattatgtcaacttcactttctagcagtatatattacaactgctgtactcatacgttttccaagctcttcaaaaataagaaaaaaactgtgggagatggataggtcttgtttagccagatcgtcatgacgggacatcatacattttgagcatgattattaagtttttaaaacagataaactacaacaaaacagtttgagttacttttctattcatcattgaagttacaactaggatgggacgtacgctaccgttttcttttctcagccgaactagtgtccgtccttgggaaagttttcacccaacgattcgaagtcctctttttaacccttatcatctggacacaattgattctgcctttgagaccagtgcagatcatgatcagactgcacatccgtgcagtttgatcatgacctgcactgttcgccattcagtcagtatcttcttggtaagcaccccttttaacagttaatggtgctgtccaaattgaaagatggacaagttcattatagaaatttagcagagtaagggttagccgtacattattagttacactgcttgttggtgacaggatacgggatatacgctgtcgaggaaatccatatcaagcgagatcgaagctcgagcctgatatagattttcgagacagcatatatcccgtaccctgtcaccaacaagcagtgtaacgattttatcttgccgactaccctttacttacatgctatacagtaatcaacacattttgtaaattaacaaagctacttacagtgcagactggaatcctacaaatcatttgtttggtcatcactagttgatttacaccagccataaaatgcacaatgacctgtgttttggttaaatcactaaacacaaaagctcatttacacaggttatgaactggtttagattagaaacactaaaacatttcttgttccatcccttcgaatgttaccggaaatcacgatgtcataaatgtcttgatacttcagctttcgtcccgtttcctgttaaatcatttatcttgcacgtagattaaatgatcctacaacaaactgaggagcaacaaatatgtcaattcctttatttcacgatgatttaactatttaacttccaaaacaagatttcaacgtccgtgtattccatacagagttattccgcttttacggctaacttttgccaaacttcatgagcctcaacttaaatagaataaaatcggcaagaaaacactaaatttactctcggaaacgatactataactggagctaacaaataatctggcttaattcaattaagacagcagtgtggcagccattttgttttaatcaaaattcatatctgaaatatactagcaggatatagaatatatcctgtctccacgtgacgtctgttgaccaatagaaatgcaagaaacttgtaggaggcgagataaattgttgttgctccacatgtttcaatatacgcgttcaacataccgttcacatacaactgtaaaaagtggcataggtatatagtacagaatctgatgattgaaattcattgcttacatcaaaaggagtttttttttttttttttttaataaatcattagtttatgattcgttaattatacataagtaattatagcgtagttcaagcagatcataaagtgataaaattaaatgatagagaagacagatgttccggtacgtatatgagccgcgccatgagaaaaccaatatagtgtgtttgcaaccagcagtgtttgcaaccagcatggatccagaccagcctgcgcatctggttattcttatgttacacattattttctacccattaagaataagtcatggagaagagaatatagtgtcctcctgtaacttgtcaatgaatatttgagaattggaagttttctctcagtcataaaaattggattgaacaattgttgaaagtttcgaattaattaatgcttcatacatatttatgagtgatcttctgaataagtctgaatgtgttttcctttttgttatagtgataaactttcatttgtttgctatttcgaacaaagtttacatgtggggaggaaaatgtgtttgacaatttaatgttttcgttaaaaaaatcatctgattgcatgtctaatcgcttttcagaatacaaaaaaaaaaaataattcaaaaaatatttaatatgttaaacttagtggtagtcgcgtgcgtctaacattttagtgcaaagagtacattgtgtcatttgtttataggaatatgagaaactaaaggaactgtagcgttctttgtggaatctcgttatcaaacacggcgtaaaatttaatttaaaatagaagttttcattataaagcaaaacatcaacgcaattaattgaccatacagtgattgacgtcatgaggaatatcagcttgagcattacacatcaattatgttttagcaacattggtattacatcactcaattagaatcaaacaccgataatatttgggtatttagccgtgtaagggaaaatcatgtaggataacgagagttgaatagtttgcttcaatctaactcgttaggtattgataaaaaaagaacagtacacatgtgtcttgagggtttgtctattaccaacagcagcaatgttctcggtaaaattaaacatgtcgttttctctcattaaactgaaatgttggcatcgacctgtaatatttcttatgatccacttgtttgttgaatctgtgtatgattccatcatcaacgaatgacatgacttgaagattatttaacgtaatgcagtatataatctcaatatttgcagcaaaggttgtgttttcgtccatctatgtatatacacagtaatagtctaacagcacaggttgcaggtgtgagtgaacctgctcatggacggtattggaaatacatgctaccgtccacgccctcatctagccccgggttgagcagaactcaacatttaaacatgttaaaagtctttgcagatcgcgaaaaaaaaatgcggtagtcagttaatgtaccatttgttcttcatgtttttccatgataagaacactgataaattgttgaaactagagtgacgggacgttttgcaaccttagcataaggaatatagtgttttgtactagttacaagctacttgttcttagttcttagttgtacatcactcatttaaccattgaatgtatttatttaccacaataatgcataaaacacgatgtcagtcttgttggtcacttaattcattattattataaccatccatgtttagtttgaaaaggaaaatgatacttggcatgctcccgctgctacatgatggtgcaaatgacagcacccactttggcaaacacaagtgcagacttataattgaaagccaattttctaaccataccttctgtttgagcattggatacggaacagttgcaagtctgtaaaaatgggagcaggaaattggctttcgaacacctgttgttcaaactccatactcacatttatagtgcataggtaatttgtctttgaacagagagaactttgagactgaaatacttagctcattcgcctcgggtgacgccttttctcgtttctcttggaaggagcataagtgaaactttcgaaggaaaataactattaaagggaaaatattttctcccgtccgtataaaaaaaaaatagaaaaagtggaaacttcataggccgctcaacacgacaaatacaaaaacgttgcaggctcggtttgattgagcctgttcatggacggtagtggtttacatcggcatattcattactgcagaatgaaagaaagcacgaacagatgtctttatggaatgctgcatttgtccgttcagattaactgcgaatgctcgaactgaaatgcgatgtctcgtcagccgactcaactccttactcggacctgaacttgaaaaccaaatttgctaagacggacgacagagttatgtgcgctttttcagttggcattcgagcaattcgttcgcagaagcgaacgttaaaccagatgctcaatgtgagcaactatgcttacaattggtgcaattacctcgtgcaaaaagtagttacagaaacgaatttgcgcgacgttccagcagagtacagatttccctgagacgacttgtcttttgacaagatatcgcctatcaagctgactgcctgtaagaccttttgcgccatgtacaagcaaacgaccgaacggaaaattcacactgcacatttcgtgtgatcccatatgtacgcgacagatataagtgcacacgtcggactccatgttcgatcgacccggcaggtagaacgttcgcgacgtgttacgaccctagcaacctaaatggcatagaacaattgacaattcattccaggcatgtctctacctgactcaatacgggcagttttgtcacagattttgctctatcttgggcaaatgtgtcttctggtcatatgagttatcctaaagtggacaattgtttccatccatgcgttagcaaaatacgaggactcaaagtttgacaaaaatcatgccctttcttcagacatgccgtcatgtgaaaaaataaatatgaagtttttcctgctacaaatgtatcagaacaaaagcagtgccatatgcagaccctttttgtacgttagtcccttgtccctctaacaattctataaagtttctttaaccgtttctttcattttctcgactcatatattgtaactatcgcgcacttttttaaagctgtacgaattagataggttttggctgccaaaatacatgatgcacaggattctcgttttactgtcttgatgtagttgcatgcatatccttacgatagggttgcattcaaaacatttacaaatcttactgaatttatctttgacaagtaagatttaaacaacgacatgctagacaacacagaattttcaatgagttctacaataaaatgtaaaatgtatattggtatcttgaaatgataatcaactacactatacatcatgtaaaatagcggactacggtttttgcagagacttattgaacggtcaatgtttgatatttctgtatttgacaaaacatattaataaggaaaatggacaataaagtagtacaagactttacacaatttgtacaaatgcgcatgtcatattcggaaaatccgaacgtagcaatagaaataataatggtaaacaaacccataaatcgtggttttccgagagacgctataatgcaaaacaaacatttagaatgcatcaaaaccggtataataaggatgaaattgatgaaaatcgttcaaattttgcatgagcatggacatattacattagaataaaaagaagtctagacatgcttttcaagtaaaaagaggatttaaaaaagcaatttagcatcctcataaccatggacattttggcaaaatattaaaaacatatacaaattttgcagattcaatgtcaattgaagaactgtttacctatttcgagaatatgttcagcggtgcatcctcgaataatgatgaccaagaaattggaggaaactttgatttaaaaaatcgggaagctgtcttttcacagaataataataaaagctcggacatcgacaatatttcagctgaaatcttcaagtccgcctctcatatatcatcaccattttttaataatttgtttaatagaatattaacgaatacccaggagaacaagtttgtactggtacagagtccatgtaacataactaaatactgttaaaccaaaagcaaataaccaaactaaagcttatgttctcggctaccatcatggaaataatgcaaccttacacttggccgatattttcaagggctaactgaattatcaaagcaaataatttcaatgttggaatgcataatgttttccttaaatgggtaatattcttaatttgaaacatcgatatgcaagacaataattgcaagaacggatttctgacatgtatgtaggaagaagtcagtactaatagacgcaccgccttttttttattattatcggatgcttatctgaacatagcgatatcttatagtcaccaaatgtgttgattctgcagaaatggagatacactttatcacagacaaaaaagaagacaaaatgtatgtcataggcaagaaaaagaaacttgaatagccatttttagtgtagtaaatcagtctctatgctggcatcattattttggacaatgctcaccttgaaatttaagcgcacatatcataacgaattacaaaaaaagacattctgcttatctaaaagtgcagttgcaatgtatcatttaagacgaattattctacactgacgtactcattcaattatatacagtaatcatttatactgtaagagtcttaaaataaaatctgaaatgtaaataaacacagtgttgtgttttgttgtctggtcctttgggattatggaatccatccaaagattgttttacacaagagaattcctcttacgcaattgctaggggaaatgaggaggttgcacattacattgccactcaagaataggcttaataaaagcctaggcctagcggtctagcaattttgcagcctggcagagcagcagtctagcaacctattagtatatagtattgcattttaatacgtccgcattttgggatatctactcttcgacctaaagggaatataacgatgcgaagagccgaatacatagtgcgagaaacgattacgtaactttgaccttttttgttttgtttcggtttggttaaacggcacataaccttccgtaagcttgttggatggtttcctaatgaagaagctactcccaaatgtggaccagtttcgtattgtttatatatgtacatctgctgttataaatgaaaataaatcataaaataaatgctataacagaataattgaaaaaaaaatgacacataatacagagttattagtcatataagtagtggtgggccgacaatcggcggcaatcgaataatcgtcggcgttgcattcataagcgcgatcgccgacttcacttttccctgaccgattaattacttgtcacccaaacggatagtttaattgtttctgactttttttctttctggtatttacggttcgttggggcaattacgccaagggaaactactctacataaaaatggctacctccaaagtgtcaaaagaaattgatgtcatctgtgatcacctagattttggaagatatatggcttttacaaaattaagccgggaaacccatcagcctaaactcttgacattagtatggcagtatgcatagcatgccgtaagacttacgcaagcatattagcaaaagtattttcattttttttttttgattttgtgggattgaaatcattctaatcgttaactaagaattaataaatcgttaatacttttttgctccaaataattttaatttaataacatagtatcactggataagtccctgatgaaattaagacagtacctgatttgaaggttactatcttcacaaatattttacttttgtgctgttatatatacttactcatatctatgaagggatacaatagaaataggatatttgatgtctgtgaggttcatttcttaagtaatgacataaaacatacattgtgaggtgaacttatagatatgcaactagagtaaccgattatccgattatagccgattaatcgaatcggttggcttgtccgattatgccgattaatctgttggcaaatctaaccgatttgcccatcactacatataagtcatatacacgcatttagaatatttgaacagtgcctttcaagtgtttcttgtttgagaaaacctggaggtcttaatgaaaagatacactggtatgataactgcaggctgttgaaaattactgatatatgtaaacagttttattaaattacactgaataatcgatacttccagcgatctttttagatttatgtttaatttgattttatttgcaaatacggtctcaatacgttccttgtgcaaagtagtataaaaacagctagtgatgaaataacgactgttagtggtactaatttaccgctgagattttaataccatcacgccagaaattgaagttgcgtgggaaatagcttttgcttttctgcatagtgtttcaatcacgaaagcggtttcaaatgcctatgtctttctgtttttattatacgcgttaaaacttgaaagctaaatcgtccttttcttttcccactgaataaacgtctcggtaaatttctcttccaagagaaatgatcgctttacgatgtttatagtgttacagatgtgaagagggtttctccgtggttaaagtcattgacctcgaatgatttgccctcatcgctgtgggctcgaaacatcgctttgattgtcgatattttttttaatttgaggaagtcaccaagctggcaagctggtctacggaggtctagccaagactagccaagagtccgaaacacatgtataaaattctgagtgaaagagtaccgtaacaattgtcttgatacattgtcaaagtaataccaagaaaaaagaacacttttaccaacatacttgagtcttcaataataccacgattcatttttctgtcacaagtcggcattttgttagaaattcaacaatttcaagcgatttttgtaaatgcagaagtttaagatatacagacatttaatgtcagtagaactattttattgcataaatacataatcagatttctgtgaatttgtaagaggtgtttatgggtttgttttgtgaattttgacgactttaaaaacgtagttctaaattatgtcaacttcactttctagcagtatatattacaactgctgtacacatacgtttcaagctcttcaaaaattagaaaaaaaactgtgggagatggataagtcttatttagacatatcgtcatgaggagacatcatacattttgagcatgattattaagtttttaaagtagataaactacaacaaaacagtttgagttacttttctatttatcattgaagttacgacggggaggggacgtacgctaccgttttcctttctcagccgaaccagtgtccgtccttggggaagtttttacccaacgattccaagtcttcttttaacccttatcatgctggacacgattgattctgcctttgcgaccagtgcagatcatgatcagactgcacatccgtgcagtttgatcatgacctgcactgttcgccattcagtcagtatctctttggtaagcatccccttttaacagttaatggtactgtccaaattgaaagatggacaagttcatgatagaaatttagcaaagtaagggttagccgtacatattgttgttgctccacatgtttcaatcttttgatgtaaagatatgccgccttttcaatatacgcgttcaaaataccgttcacatacaattgtaaaaaatggcataggtatataaatacagaatctgatgactgaaattcattgcttacatcaaaaggagttttgttttttttataattcatgaaatataattcgttaattatacataagtaattctagcgtagttcaagcagatcatacaacgataaatttaaatgatagagaaaacagctgtttcggtacgtatagttagttaagattgtaaatctttataaaagatttattccaccagttcaaaaaatatatgaaacttatggaaatggaaacttacgtagtgatattaatttaaatgttggaatttaaatgatattcctgggttttcgaagactgtacatattacttcttctaatactttgcgaagttggtaagaccatttttattatagtttgttggttattcttatgttacacattatttttctacccattatgaacaagacatggagaatagaatatagtttcctcctgtaacttgtcaatgaatatttgttgaaagtttcgaatttattaatgcttcaaacatatttatgagtgatcttctgaataagtctgaatgtattttcctttttgttatagtgataaactttcatttgtttgatatttcgaccaaattggacatgtgtagagaaaaatgtgtttgacaatttaatgttttcgtttaaaagttcatctgattgcacatctaatcgcttttcagaataaaaaaaaataattaaaaataaatttaatatgttaaacttagtgatagccatgtgcgtttaacattttagtgcaaagagtacattgcgtaatttgttaataggaatatgagtaactaaaggaattgtagcattctttgtggaatctcgttatcaaacacggcgtaaaatttaatttaaaatagaagctttcattataaaacaaaacatcaacgcaattaattaaccacacagtgatggacattatgaagcatatcagtttgaactttacctaaatatagaatttcttcaactattgattttgatgcttgtcgtggtcagattgcggaatccatcgaaactttttgtgttaaatggtgtcgtcgtgagaatgctgatcccaatgcattaacgtcttggaaacgaaatattattaacattgttgattctcaaataaaattttatcaaactaatgaacacctacttccatcaaaacccaagtttactttaagacatttgaaaaaggaaagccaagaatttcattctaagtatgtcttagttccagcagacaaggcgaccaacaatattatcatcatttgacgcctacattatattaatgttttacaaaacgaactaaatagcactaaaacttatacattgagtccttctgttgaaaataagttggtcactgatcacatcactgaaatttctaatttaaaagtttgtatagatgatcaacaaattaaactaccaaccatgtactggattcctaaattgcataaacaaccatataaagcccgcttcatcgctaattcaagctcttgtacaactacaaatatttcaaaactattaacatcatgtctaactgctgtgaaagcccacgtggaaagatactgcgataaagtatacgaaaactctggtaaacacttattttggtcaattaaatattctggcgaaatcctggataagtttaaaattaataattacaaggtatctacagtcagtacatacgatttttctacttagtataccactttaccacataacttaataaatgacaaactaagtgccctagttcaaaagacttttgccagagagaatgctacatttctcgcttgcaattttaataaagctttttttactagcaatattattaaacattatacaatgtggacctgtgacgaagtttgtaaagccctttcctttttattgaacaacatttacatcaggtttgggaatgcagtttttagacaagttgttggtattcccatgggaacaaattatgcaccccttgtcgcagatttgtttttatattgttatgaaagagactttatgttgagcctttctccagatacgcaggcagatattataactgcatttaataatacatcacgctatctggatgatattcttaatatggataatccgttttttggtcaattggtgagtactatttatcctagggagcttcagttaattaaaactaacaattcagataccgatgcttcatttttagatttacatctctctatctatgacaatattatacataccaaaatttatgacaagcgggattatttgaattttagtattgtaaattttctccatttggatggggatgtacctcaggctacatcttatggggtatatatttctcaattaactcggtttgccagagcgtgtagtcatgtcaaacatttcaatgaacgtaatcaatatattacaagtaaacttcttcaacaaggctaccgttacaaattgcgtaaatactttgctacattttactatcgtaattctgatttagttttaaaattcaatagtaatttaaagacacttctgcgagaaggtatttctaaacccgttttttatggggatgttgtttacaaacttcgtaagatcttgggtcatggtaattttccaaatgtatttggtaaaattataaacgttttattaaaagaggttacgacccaactgttttgagacataccgcatgtttagtgttcaacccgtttacagttggacactacgctttcctctttgattgtgtctgacggaagagggggaggactctatgataagcagtttttaaatcctaccaggactgaactgttttgatatttgtcttctggcctgtttgtcgggcccttaagggtgtttctcttgttgctctgtcttctggaaaggcattgagtacatacgtttttggttctaaaggtttgctttttatatatttatacacgagcatttttgtgttttacatgccatgcctttttgtttcaattacgtgtgttagagattcacttgaaggggaatacttttatttacactgtcccgtgtctttggaacatggtgggggtaagagtgaggttgagtgcgcaccataaaccggtttaagctcctcggtggtgtttttgccactgaccgttccaaggcggtgccccactgtgttcttttgtttgttctttttaacctaatatgttggctttttgtgtgtgagcgcgtgtatgtgtatgtgtgtttgtggagtacgcgtctgcgtactgtgggtttcgttttggggaggctgcgtatttggtacgtggcattccgtttgatatttgtctttgtttgttttacacattaattttgttttagcaacattggtattacatcactcagttagaatcaaacataatgttttctaaccatatttcgtgtttgagcattggacacggaacagttgcaagtctgtggaaattggttttcaaatacctgacattcaaactcgatactcgcatctactgcatagcttatttggctttgaaaagatagcacagctggagttcagactgaaatacttagctcattcgcctcgggtgacgctttttctcgtttcttttggaaggagcataagtgaaactttcgaaggaaaataactattaaagggaaaatattttctcccgcccgtataaaactttgtttacatcagtatattcgttactgcagaaagaagagaaagcgcgaacagattactttatggaattggaatgctgcatttgtcaatggacatgaaacgttcagattatctacgaatgctcgaactgaaatgcgatgtttcgtcagccgaatcaactcattactcggacctgaacactctttcagttggcattcggccaatcccttagcagaagcgaaccttaaaccagatgctcacaaatgttgcaattatctcgtgaaggagaaagacttccaacggaggcaggttacaaaaacgaattagcctgacgttcccggagacgacagtgtatttttggacaagatgtcgcataccaagttgattgcctgtaagaactttggcgccatgtacaagcaatcgaccgaacggaaaattcgcactgcagatttcgtacgcgacacataaaagtgcacatgtcggactccatatcttccatcaatccgggaggtaggacgttcgcgacgtgttacgaccctagcaaatctgcaacggaggtctcaaagtagatatggaggacgaggaggatggacgttcgtctaagcctcctgccatacctcctaaacctttaacggagaaaaagattactaggatgtcttctcctgagaagactgaatagtgtgaataccatgtttccagatagaacatatttatgtcgaataaaataatccagtggaactgccgtggacttaaagctaattataatgaaattctctttcttctatcaaaatataatccctctttgatgtgtttaagtgaaacctttttgaaagaaagtgacaacatatcctttaaaacttattcaacgtataactttatcaataaaagttcagaaaaggcttctggtggcgcatcaattttaataaataatgcacatccgcatagagaaattgttttgaatactaccattcagtcagttgcattgcatgtaactatggatcgaccaataacattttgttcaatgtatatatacctcctaaatttaaacttaatcttgaagatcttgacaacctgatcaatcaactaccgcaaccatttattctgatgggagatttcaatggtcaccacgcgttttggggttgttctgatagcaatgctagaggtcaaattattgaaacctttattgaaagaaattctctctgcttactgaatgataaatccaaaacacacctacatcctgctataggacactactcttctcttgatttgtcaatttgtcaaccaagcctttttcttgacttcgaatggagggtgctagatgacttacatgggagtgatcatttcccgattatattgtcaagtattgttcggcaaacatcagttgattcctcttattttaaatttaataaagctgactggcagcaatatcagtatttatgcaaaaatgatttgtctttggagaatttcgccaatttttttgatcctattgatcggttttctgttattgtatcagatattgcagacaagtccattccaaaaacttcaaaaaatggtaaatcaaaaaataaaccatggtataacgatgattgtaagaccgccattcgaaaacgtagagcggccattaaaaaatttaatatccgaccgacaaaagacaatctgcaatcagttaagattctcagagcaaaagctcgcagaaatataaaacaagcaaagaaaaactcctggcattcatacgtttctaaacttaattctaagtcatcggttaaaaaagtgtgggaaatgatttgtaaaataagtggaagaggaaaaacttcaaatgtttctcatcttaaacaatctgaccagactactgcatctaccaaagaagacattgctaatactcttggtgaagctttttcaaaaacttttcttcacataattatgaccaaagatttcaaaacattaaattaactaaagaaagcaaacctctgaattttgattcaaataatgaggaagattataataaacctttttcgatcacagagttaattgactctttagacaaatgtcatgatactgcagctggtccagaccaaatacattatcaacttttaaaacacttttaaaatctttagaccttctccttgaaatctacaatattacatggaaaactggtatttttccagactcctggagagaagctattgttattcccatacaaaaacccggaaaagatagcacgaacccaagtcattatagaccgatagctcttactagttgtttatgtaaaactctggaacgtatgatgaattctagactattttggtacctcgaatcacaaggtttaattacaaactttcaaagcggctttcgcaaacaacgcagcacaaccgatcatcttgttcgactggaaaattttattcgtgatgcatttattaaaaaagagcatctagtgtctgtatttttcgatttagaaaaagcttacgacactacatggaaatatggtactatgaatgatcttaacgacataggttaaaaggtcgtctgccaacatttatatcacaatttttatctgatcgaagttttaaagtacgtgttggtgataccctttctgacccttttgagcaagaacagggagttccacaaggttcaattttatctgtcacactttttagcatcaaaagtaataatattgtgaaatgtttgttaccagggacagactgttcattacatgttgactattttttgatatgttatcgttcaaaaaaatatgcgtacgattgaacgccaattacaacagtgtttgaataaagtccaaacttgagccatggaaaatgggtttaaattttcccaatcgaaaactcaatatgtccactttttccaattacggaaacatcattgtgaccctgagcttttcctaaatggtacacaaatacccgttgttgacgaagcaaaatttcttggtgttatctttgataaaaagctttcgtttgtaccgcatataaaatacttgaaagccaaatgtctgaagtcattaaatcttttaaaggtaatttcaaatactaattagggagctgatcgcacggttttattaagactttatagggctttaattagatctaagctagattatggctgtattgtttatggttccgcaagaaaatcttatttacaaatgttagataccatacataatcaaggtcttcgtattgctcttggtgcattccgaacatcgtcagttgaaagtttatatgctgaagcaaacgaaccatccctttacacacgccgagaaaaactttcactgcaatttgctttaagagtggctgccaacaaatccaatcctgctcatgaaattatttttaaaccaaagtactccgattcatatgaggaaaaaccaaaacaaatcaaaccgtttggatttcgcatacaatcttctatgaatgaaactgacttcaaattcgatggtattaaagaaaattcaattccagatacaccaccatggacccttcatacccctacagttcttttcgatttgaaaactgcctttagaaagtctgaaacaaaccctgaaatatttaagtccaaatatcatgaaatcaagtcaacttacaatgactattttgcaatttacacagacggttcaaaagatgaatcaaaggttggctgtgctgctgtcagcctccttcatcaatcaaaattacgtttgccaaataatgcaacaactattttcagccgaggccaaagctattgatttagctctaaattttatataaaaaaatagtgcagaaaaatttattatcttttccgactagctttctgttttacagtcaattcaaaaccgaaatatggaaaatccattcattcaaaatattcttctcaggcttcatgaactatctttaaaaaggtttatcatattttgttggattcctagtcatgttggtattcatggaaacgaggatgctgatattgcagcaaagaaatcccttttattttcacaatctaatttgaaattaccacataccgattttaagcccaatataaacaaatacattttatctaaatggcagtcgtcatggaaccgtgcttcattcaataaacttcatgatatcaaacctactctaggggaatggcaccaagggaacagatctgttcgcagggaggaagttgttctttctcgctgtcgaataggtcatacccgtttgactcactcttaccttttgaataaagaagatcaacctgaatgtgtaccatgtcaaacaccgctaactattaaacacattttaatcgactgtgtggactttgctacacaacgcagtacatattatgacgttcaatctttgagagaagtatttgacaatgtttcagttggaaatattttatcgtttttaaagcagataggaatatatcaaaagatctaacacttcttatttttatttacatcttgcaatattattatgtttgcagctgatattttaacacacacgtacatacatttttacattactgtttttagatatgctttacatttttacatggatgcttttagattttttttacattattcatagtgttctttacatttttacatggatgttttaggtatgctttacatttttacatcaatgtttaggctttacagttggcgtttgcaatatgacttcttttcggcgatatatgaccattttgtgtcgattcgccgtaaaacccaattcactcactcacttacatttttacatggatgtttttaggtatgctttacatttttacatcactgtttatgctttacggttggcgtttgcaatatgacttcttctcggcgatatatgaccattttgtgtcgattcgccgtaaaacccaactcactcactcactcactcactcaaagtttgacaaaaatcatgccctttctgcagacatgccgtcttgtgaaaaaattaaatgaagtttttttctgctacaaatgtatcaaagcaaaaacagtgtcattcgctgacccattttattcgttagtcccttctccttcaaacaattccataaagtttcttaaaccgagagaaccttttatttttattttctcgacgcacatgttgtagtacgcgttagatagtttttggctgccaaaatgcatgatacacagaattctcgttttactgtcttgatatagttgcatggttatcattactgccttttacatactttaatacattcaaacacacgaggtcaaaacaaacaaataaagaaacacagagaggtaccgccttggaccagaaagtggacactgagccttttctttcctcaatggaaagcggtcacatgaccaactttgcagccgaggagggcgaacgtgtttttgtagtgctttcgctagacgtctaagtgtccatggaaagagactgcatggaaaggtttgactttgcagatacttttgaaacaggctttcaatagctgcttacgtaatctcataagccagttaaacagatttctccactgttatcatgacagagtatcattgaaatcatgttcagctccaatcatcatggactgctgtacttactatgccatatatgagaggtacagcagaaaatgtcccccacactgtataacagcaatatcttccagcattgacgttctgaaactttcatgtataacatcaagcatgccagtacctttgctattgctatatcgcctttatacggtgtgaatatacccctttttcagatacatttgtcatactgattcaattgttgtaccttactcagacatcatcttgatccacgcatgaattattgcaacgaaacaaaatcttttcacaagaagtaaggaaaaatgtaaaactatacgggattgcagtaaattcatacgatttgattaattgtgagtttaaaaaggcgaggggagtaaacagatgtaataaaattgcgaaattatcacgaataaatactttcactgcgaaaatagactggagggaagaaattaataattatttgatgagatagttgaagagcacgttttgttttgtttttacagaaagggaggcagtaaaatgcaaaattgtctgagattaaaataaatgcttatctttccatgaatttcaatttaaagaattcagtaaaatgcgaaagtaaaagagattcaaattattgcaggactttcatgaatcgaagcaaataggtgatgcaatgagctgtagaaacatggcgaatcttagtaaatacataagtttcatgaatttcagtcttaaaaggaaattgggagatgaaaaaaatgcgaaatagtgaaatatttcagtaaatgcacgtgtttaaaataggacgagggagaaagaaatgcagtaaagtatacaattataaaattattgttctaagtatttaaaccataaactttgtttcaggttctctatccgctctgtaacgtaaaatgtaaacattgaaatgcataacatgtataatacacgtttcagctaacacacttttgtgcaggagtccccgatattgcaacattccatcttatttaaaataaatgaaagtatttttatagagaacacctgaagatacttgtttctattttagagattttacgttttaattcgtgctaaaattgtattataatatgattgaatgcgacttttaattcagcctgagtaggactataatgtaaaatgatagttcagcttgtgaacgacaaatacatttatcatactgattcaattgttgtaccttgctcagacatcatcaagtcatttatgaaagtgtccaagaaatggtcttgacgtaaggagaaaatgtacatatgtgttttctaccatttcaaatggtaattatgatgttgagactttgcaacactgtatgtaagacgttgttacataattctgttatcgttgagaccttgcaacatttatgtagcttacataagttcatttgtatctagttcgttttattttccaaattgctgcaaatagcttatatagcttccgcatattaaaatagagaaaagtggaaacttcacaactcaccttttcagttatgaaaatgtagaatcaatgctttattacacataataaatgaatcaacaaggccgcacggagcgacaccgtaacaattgtcgcgaaaatgttgtcttatgttatcgttgagacttgacttacattggaacgtacctcttccggagtgttcttagcaaagtaagattctattcacacatgagacatatagcagccgatacagccatgacaaagacaaaaattatatttaagaaaatcaagtattctctactataaaagctgcgtgttgcctgcatcaaatcacataaagatatggaatgctaaagaaacctctctcctctaactctttggaaagggacataggtgttctatcacgagaacctagaatcttgggtacaattagcaaagaatggagaataaacaaggtattttgcatcaggtttcgaacgaaccaagtagcaactgaaactggaagatgaaaaaccattcctgacgatgtttagtgttggaatacatccgacacgaaattagaaaagagtactgaacgaaatgctaagatggagtaaccacgcttacaactggagcaactatctcgtttgtgaaaattacttgaagcctatgcagacttacttttgcaagaccaattctagtgacattccagctgattttagaataaacagcaatgatgactggtactacgataacaagatggcaacttttaaaacagcagcgtatattaaaggagacagacagtgaccataatgatatctttaaccactatatagcagtcatggcacacagtcttacaacggaagaaggatgcaaggaatcgattcctgcgctagtctaaaactggaagaaaagttgtcttaaagattccttgtaaccaaagtacactaggagcaaatggtactatgtttggaattgatcctggcgggagaccgtacttgacaatattcgatccgtcgcagaaagcaacagtccaaactggatctcggtgtaaagtgccaactcagacagttcgtaaacggataaagaagatggagatgtctggcacaggaaaaagaaaagtcagcgacacgtcaggaaaattgtagacaagatgagtggttttcatacgtctgatgcagtaatcgtacgttgccatttgatagataaacatacctagtatcattcgtaagaaatgttaaggagaacgaagacacggcaacaaaaagtcagtactttatctgacagtctggagtctttgtttttaagaacattcttaggaagtcgctcggtatcggttcaattgcaacctaccgtgcgtgattttgaatttcggaacgttgcatcggttgactcactgaattccagcttaaccatatgggaagcattggtgtataaatatggtcatcaaagtcttttgtgtcgcaagtgcacatgaaaatgaacgaacatccatagtaatactcacattgtatacgtggcggtctttttctaatccattttccctcttgtccagcacaaaaaaatcctcttcaacatcttaccttcccacgcaaatacccattttaatttacatttaatccaaaactcattttggtaatacctaagctaacagtcataatatatcaaaagataaaattcagtcaatgaataataatacctcgtcaaatggcagtgcatggtcattacttggaagctgtttctaaagagaaaagcattaaattaatctagatgagattgaattaaatgatatgtatcgatttctgtaatgttttaatcctttagtatgcggcagatggttatgggctagcagctttggaatatttcagtggaatgattattaggacattaacagaaacatctatcatattgcaaaatgttcgtgtatgatatggtgcacttcctataagccggtgccgattataagttaagttgtagtgtttagttaggacttccagtggatatcttattatttcaaatgtccaggtaactggacaaggaatacaaagttatcatggatattttgttcttatttcgacttttatgataatttgtctgttcataacactactttgctatatgtcttttacttcttattgtcttcattttgcagaatcatttggtaaataatgcaatgaatgcttgtttatatgatgcaaaacgtacatttcattctgtttttacaaaagatgactacatatatcaaaaaatacataacgcaataatattgcttttatccgggcagtaactattgttgttgatagtggaaaattgttgaatgtacgagggttgatccaaaagtaatgtcactgcctccatggtgcgcttattcatctgagtatgataataagaatacatcaaaatgtacgaaaagtcaattctgttaacatggcaaaatgtttatttccggcgtattttcgtttaaaatgcacatgaattaaaaataatactactgacgctatgttgtcgcacgctaaaatattattggttcattatcaaaactgttaaatgcagccactgatctttatcaaaataacgagctgaatcatatgatttttttaccacctgacatcacgtatcaccgcagtttgctgttgaaattttattggcgccatcgctcgttgaaaatatttatgcagtgttaacgtttgtttatactgagaacaaatatgtcgatttctgacaaaacaccgcagcgcgctgttctgcctttttgtttttaattaggaaaatcaccgttagaggccgtgcagacgataaagacacatatagaccaaaacagtgaacaggagactagtatactagtatacaggtggtatgtgcgtttcagggacggcgatgagttactagaggattgccagagaaccggaaaacctgtggttttggcgccgtgtgattttgcgttttttcctcatctgaaagataaactccgaggggtccatttccaaaaccttgatcattcaaaaaatgtattttcatctctttcaaaggactggtatgttgctgctttccgtaaatgtgtgaacagacatgagcgctgtatagaaaatcaacgactacacttttaaaacgaatgaatattgatagcagtcagtaagaaacgtcgtttcggacgtcaataacgtccgtgacgtgaggcgatcgctgtaagtatgcctatgcaacatatcttattgatatttttagacaatattgcaaatacctataagtacttcggtatgatattaatttatttcctttcattatacacgattttacagctacagtgacattacttttagatcaaccctcgtagctcatatattagtttaattttgtttagcctttatcattttgctttcaaaataattgaatacctctattatatttataacgtaattattttgatatattactttgtcttgtctgatagccagactacgttgatttttaaagtttcctgaaatcttacactaaaactaatactttggaaataatatctgtggcatcaataacactaactttctgcgtactttatcagtctggttgcaaacttgtttcctgtataatgacagacgaaagtttagaataagccatgatgaatattcaatagaaatatatcatttgttttacaaatgtgtacaaatgtgtctgtattactcgtataataattgcattctgaaacaacattcggccgaatattgtcaactgttatgctgtaaatatgtgtgtctttcattttaatattaccattttaagaatcactaaaattattgaaatgaacattacagagatttgactttaatggtcaaaaacaaaatgcttgtatattttaaatataacagtgtagtctctaaagtgttcacgtcaatagttttctatcagaattattagccggtgtttaaagtatttgtttggtttactgacataggaattattttaatgtttttactttgtttggttggtttatgtgtgtacgttatggacttgtgagatttctcacatgaaataatgcagaaacaagaaatataaacagtgttattttatttctatgcaacaatatttatgaaactgaaactgaaactgaaactgaaactggtttatttgcttaaacgcctatttctacatttaaaacatattcaatggcgttttacaatacaagttgaaataaaatattaaatataaaatattttaaataagattaattaaaacgaataaaaatagcaattattaatttaaagtcaatgataatactatattttaaaatattactaacatacaattatcacagacaaacattaaatttctatcactgtcaccagcatcactgtttaaaactcagtcaaaacttagaataatgcaaagtagtctctgaagacatgcgttttcaactttttcctaaagcagtcaattgaagaactttgtctgatgttcaacggcaaattgttccacaattttggccctatagtactaaagcttttatcactaaaagtttttcgcttgttgaaagggacgatgtaacagtcaactgatgactccgaggatctgagggagcgctgggggattttcggtgttaagagttcaatcaaatatgcaggcgcatttccaacatggcaattgaacatgtacgtcaagatcttatgccagatatccgtgcacaaaaccccaaccaagcaaatcacgtgactaagtta

SEQ ID NO: 4927 - DNA, 9949 bp, Mercenaria mercenaria
  source 1..9949: mol_type = other DNA
ccggtctcgtcgtgcgtgtacgatttagagatctcattgagttgattgtacgtgctcagagacttgctacaaaacgctcggataagcctgttgaacttggatacactctcgttcatgttcacgaatgacaccttttcatatcgccttatcatgtagttgagaagatggtagttttcttttggattagtcaactctctgtccgtgtagtacttgtcgtaaatgtcgccgacaacgtacagaggaggcttcatgccataagcaaaacagtggtaagctatgagaaacattttatgtggatcgtagttcatgttctgtacaggttctgaaaaaagccattcatctcgctatacagttgtacgaacgttttgtcaaactttgtcttattcttcactttcacggacaaacgttcgggaatcaagtcttgcacgcatttgctgaagaaatatcgtttgggtaatacacaatggttattcacgacctcgtttttgaagacgtccaattcgagtttcaacactcgataaggagcggagaacacatcgttcaagcccgttgataacacatgtaagtacaacagaacgcaattaaaagagttagcgagtagatgccgatcgtttttatctatattagtccgacacaagaataacaaaagcatatcggttttggcttcggtgacatacttctgtctctttgaattatcaaatgcataaactggtaacgtcagagctttgaatgccacgttcgacatgttgaacgcctgtagacgatgttgtgcctcagtgagttcttttctgccttcgagatttcgaactcagccctcgcttccgaccattcgcatcaatatgtacaacaacgacagcgacgacgacaacgatgactgtgatatgtcttcttctgccgaatgtcgtcaactgcttgctgcgagcaaatacttggatcgcactatggacgacgatctcgagtctcagtttctgacggacgaaatcgacgaagctagtctcaagatgtattgtctggaccgagtcagtctgatcaacgaagatatgaaagatcctagcctaacgtcgagtgaaagacgtatcaatcaatacaacttgcaggccctcaatacaatactgactaatatccgtatcagcgagaagatcaaacttggctctctgcagaactctcaatacacggacgctataatactccaaaaacagatcgtgtgcaatctagccggtcagaaggaatacagcgaattgatcaatcctgtagtcttaacgcagcctcaatcaacaagtacgattttgcaatcggtcgagttgcacgccgcgtctgaacctgaaccggtggaaaatcagaaggcaaatgaggtctcaaatatcaaaccgatactgaagtctaccaagacgccgaaaaataatattaagggaaaacgtgtcgaaatttcaacataaaagcgagtgcacaagtcacacctctccacttacaactaattactactaccgttcacaatgtctttcacgtctaaggaatttcaaaactttctttataacaagtgcgttgtgctcaacgaaggtgtctttttgctacgtattagcaaaacagatgtcgagcagtcggacattttcaaacagtgcttgtacggagatgcgtttccttcggcttattcgcagaatgtctcgatgataccgactggcatatttctgcctcagatgatctcggacaagaatgtcttcttcgaacacaaagtggagaacaagaagatgccgtttcaagacaccttcacgcagcatgctttcttaatccacgattccggacatcatcaagttaaggagatgtacgacaacgtgttggctaaacaggacaatcagacgtatagcgtactctacgataaagtgcttgaatctgtacgcactcatgaaaagaagttgaatagatccgttagccaagagaacgagttagaaatgcttctcgacaccgatgtggacgaagaaacccagagttacttgattgacaacaatgagtactacacggtcatgttcgcaacacagacagcgtcggtacgtcttcagttacacgatcaccctaagttgaggttcggaagtgaggacgccaacatcaacgtgactctcgcgaataacagcgttgccagaatcgacgcatacactgactgcgaaaagtgcgtcgtgacattatcggaacgcgttactagagccattaagagagaattactaacgatgacacaactgtacaccggttactgcaaactacctattcagagcgtaagacaatacttacagaatactatgtgtctgtacagtaatcagtttaaggcagtcgtgtgtcaagacgatgtcaacgttgagagctattcggtgtctgctctcaaagtgtggttatcgggtaatcttgaaatcgacgacatcaacgcctcatggtctattatcggcgactctaattacaaggacacgatcagggagaagatcttgtttcagctgctgatggtacttgacagagggtcgtgtttcaactcgagacaattgtctcgacgcgatatgacagaagaaaaggcatcgattatctgcacttcttcgtacactaatccggcgaatgaactgaagaacgccgtgtacggaaacctgagcatggtagtgcatttaacgaccgaatgtctgttctttactcgaaccaaactacgtgtcacatgcgaaacgtgtcagcagaagtactgtgccgtgagcataccctcgttgatgtttaagcatacaccgaacgtacacaggaaaaaggaaaggtcgacagttgttgcctgtttcaacacttctagcatattcaacaagacgggtcctattggcgacttggttgacgatgacagtaaaggatctgacgctttctctggtaacaagatgaaagacaagtcattcgataagaaagtagactgggataagcactatcacgatttgttcaacttcttgaatgacaacgttaattttgatctcaaaacgatgatcgagaatacaccaacgacgcgcgataacattgacgaacgagcagagaaaataatgaactggattggaaatcaactggaaaatgtcgttcagctttccgaacagttctgtaaggaactcgacgacggagcagaatctataaccaagacgtcgaacgtggaagttgagatgaagaatgtatacagtgtacaaaatatgtacaacggcggattcatgggcattctgttgtctgagagcctgctgtattttctaagatgtattgtcctgtacgaacagaagtgcttcgaaaatcagacagtgaacgacgttttcctaaaagtgaaaccgttgttactcgacaacaagtctggatttacagtgaatagaagaggtatggaaaagaaattgattccaatgcaaaagattacgatgagaacctgctgtgaggatgataacacgtacacaataggcagcaaatacaccagaaactatctgttggatgagatactgtataaagtgtcttacaagtgcaaagtgtttctcttcggtcgatacgacgagaagaagaaaaatggcaacaaagaaagtcagcccatgctccagaatatgagcggtcgaaaaccaaacagtatgtcagctacgtccgtcggcgttggaaacaacagtttcatgcacttcaagacattctgcgcggatcaagcagtggaagcactggcaatcaatagcgacgatgatgaatactgtcggcaagtcttgaaagagtacagagacgacgtgctttgggaatatgcgccactgtttagatacgtgaaagaatacaagatcgagaactggacggcgttctttcaacttgtcagcgtgatgaaactactcgagtatttgagatttcaaccgtcgtatgacagaatcacgttcgctacgttcaacagactgactaaaaaggaagagaaagacgagtacgtgttcgttgacgacaagatcggagaggaattcgaaaagatggaaactctgtacggcattaactgcaccatttcagagttcactagcgtcaatcaaaccaaaaaagctttgtacaagaaatgtgcgggtaaatttcttgagagtcagaacgacttgctgaacgattacagcagaaccaaaatgtatccggggtgtccgatctactacctgccgttgagggagaagaacaatatctttaaacaaagttcgaacgatttcgtcacaaagtttattaacgaagatcagtacctacaggaaaaggacgcacagtacacctcttttatagtcagaaacaggagaaaattcttcgactgtctgttcgacataacgtttgctgatcaaggaagatacatagaggacagatacaatcaagatgtactagacgaaatactgacaacgtttgacgaaaactacccagtgtcagtgtttatcagcgaacagatgcattcgttcctgagattagtactcagtgaatatctgaatccggatcagaacgccgtacaggttatggtgaaacgcatcaaagaagtccacatgagagttaaaaacagagctaacttgaaaaagaagcgagaacgcgaagaagaggaagacacgtgtactatggacaataccgatccacagacagcatatgatacattcggcgagaaagacgaagacgaagacgaagacgcagagaaccaattcttaaaaaaacgcaggaagatcgaatgaatgaatgtctgtaacgctatggactcgtttgaattgtattgttgaagaaaattgcttactattttgtagcatgttattagttctcgtgtttatctttcattattttagtcatgaaaaaaaactcaagtatcaaataaaacaactgtcaagatatcattctctgcactgtgatccttttaccacattcgacccgcatgacgacttttctcgtttctgtcggagcaagcacttttgatgaaaaaaaagtattaaagggaaatcgaaattttcccagtcaatataaacctggtgtacttctgtttactcatcactgcagaaatgaagagaaaacgagaacagatgactttgtggaaagccgcaattgtcaagggacgagaatctttctagtcctggatagacaaaatgcgaatgctggaattgaactgtgacgtcacgtcggcaagctcaacacattactccgatctgaatttgaaaactaagtatgctaagacggatgacaagtttatgtgtgcattttctgtcggtattcgacctacgtcaaagcagaagcgaacgttgaatcagatgctcaaaatgagcaactacgcttacaactggagcaattacctagtggaatagtatagagtgtttttttttttgacatcaaatagaacaaaaaatgagtatatattgaagagctgaagattactcatcgtgtagtgttgcggagttgagtcttacgagaagacacatacatacatatacacacgcacgcacacacacacacagatatgtctgtggatcgaatcgacgtacatttcgggcgggacaaacatgaagaagaagtagacgataaagaacgtaaagtcgaaattgacttgttgtaccgacagttacaggatagtgcgactaaagcaaagctgattaaacacagagatcgctatacgtctttctccgccactgccaattacgagcaacaacttgacgagatcttgcacgtacattgtaacaagcgatctgatcctaatattgtgaacagtatctttcttgtgtcgccgtcgatgaagacgttgaacattcacaagatgttacacaaccgcgtgtgtattcaagagagagggagtcctagacaatggtctggatacaacgtagactacgagcaacaattgcagtacatcgacgttcgaaagttcctgaactacctgtggtgtgaccaattgttaaactgtaccggttttggcgacaaggtgtgtcgcgttaagctggagaagtacgtgaaaggcattctctctaacctgaattgtctgtcgtgtacagatcaatcgttgttaaacaatgccatcgaacacgttaactcaaggtatctgaacgaacttggtaacgtcatcgacacgagtcttaatgcgttcgtttccaatttcaacatcagcgagcagttcgagctgttcgttgaatgggacatgattctaggcgccgtgcctgttcgcaaattgtcagaaaccgatagtgaaacgctgaacaggatcaaacagacaaagtcatgtttttcaatggctacattacaacgattgctgacggtgcaaaatacaatacctcctatcgacaatgtcgccgttatattgtgcgagaacgaggtagaatgttggcatttaccaactaaggagaagctagaactgtttggaacgtgtaagctaagagtagagaacaaagagatttgtttaggaacggcaggcgagactctgtattacgcggaactaaaagtgatgcacttgaacgagaaacactacgagtgccttaacatgcaacggtacgttctgaccgaagtggccaaagacgaatccgaaaaggctaacgatgagaagaacgaaggcaaaaccgacgttgaacaaagtccgctgtttgccacgctgactaagtcgcaaacggctctgtttgacgagaacaatcctctgtccaaattctcgcgcattcgcgacaggaacgaaaacatcaaacagtacctatcgcgcgtatcgaccgaactggacgagctgcaagacaagatgaattccttcctctatcaggtatcaccgaccaataacaacagcatcgtcgacgagatggtgcgcatgggtatggagagctacctgaagaacatcaaacccaagatggaagaatgggagagaaggattcgagaccacctgaacaagtttcgcatgtacgctgtaaagcagttggcaacgttaccaaaaggtctgtacgagtttcaagaacaagcggcggaactgaatgccgacaacaacatggacatagaggaattcttcgacgacatgtcttccgctaacgtgtccaagggaatcagcgttccgaacatctcgcacttgcaagacatcgacaagtccgaagccaacgtgaaacagatgcaagaaaagatgagtcagtatttcgaactggccacaactttcatgggctatcttcgagacgcacagaaagtgatatctaagttacgcatcgacgacagcatgaaggagcttcaggtgaaagcgttgaaagaacaaaagaccgaaatcgtgaaactggccaccaagtacagggaaatgtcgaacaagcgcctcgacacgtacagagaacagtttcagtcggtcaaaaaggagctcgagagatacgtggactttcaaacgcagacggcggagaaaacaaagcagcactttctcaacataagagatacgatgttgactcacaaaggcgaatggatcgacaagtttcaggaaaagagggacaaacaggccgaaaggttgaaactcctcgaggagaactttgcgaagcgcttcgactccatgacgaaccagttggacaaacaagaagacttcgaacctcagatcatcaaggtggaaggtcgcgtgaggagagacaatttagacaaacgaatagacgataacacgttgctgatgtacagagaaatgctcaaacaactttggaagggagtgttgaaaaacctggtctgcattcaagagacagttaccagaaacggtattcagttatacaacgtcgacgaagagcaggtgttgcaaaagtacgtgctgaatttcttcaagcttatctacggtcaggttttcttcgtcaaccgtagaactctcgacgaatgtgcaagagtgtacggcatttacatcgcaatcgaggttgcggttaagaagatggcgaagcttccgatcgaacagacaactacaacgacagtcaaacataaaaggtacgacgaccgcgacgagaacactgatactggtctgttattctcgaattaatgtatttatattatcacaattcgttttaaaagactattaaattgctatgagccgcaatgcaataaagcagttcatcaaaattatgagtcagtttgataatttggatgataacggcattgactatgaggcgaacaatctgtacgatgaatttaataacacacctagtgaatcgtacaagttgaacgttgtcgagtcagagaagaaggaaataaagaaggctaagcgtagcagtagcagtagaccgtctctgttactcgacgatccatcagtaaacgataacacgaagattgacatcgatgagtctgtaattgaaacaacgaagtccgacttctacaagacattcaaacgattagtcacaaactacaccaaagactggattcgttctgtttacgaccagaacaggcaaagcattgaagacaggcaagtgaaacctgatgtacgagatgttgcaaaaagtctcgatcatgttgatcgaaacaaagacaagcatgcagacactcctgtcatttctatcaccattccgtccgatattgacaatgaacacgccgctaatgaagacatctcaatttcggatgcaagtatttcagctgcggcaggtacggttatcattggcgatgctagtatgtctagatctgatgacacagtgatacttgataactcgaacgatgatcgtgtcgacaataccattcacccatatgatagcttggacaagaaagacctcgagaatgatattggaacggagtccaacgcaaatacacaaatacttgcattgaccgattcgcccgagtcaatagaaccgaacgcgtcagctagcgaagatacgttaccaatcttgcacgaggaagaagaaagcaatgcagacaaagataacgcgtttgagtcagaaagacaaatgctagcattcgatacgccgattgtccaaacggaacaaaatccatcgattgatgaacagacaaaacccatgaaacaagcgcttgatcatataccgacaattaaagaacctttgaaactagaaaagcaagatgtgaaattaaagatcctacgtcccaaagccatcgacatgacactggcggacgaaaaagacctcagaggttcaaatagcgaccttaatattacgccttacgtccaatatgtggcaaacaagaaactcttcgaagacgaggagttggcgcctgagcatagaacgcatcagtgcttctcttggaatattgtggctctgttctttgcacaatttggtggcagatacgcaatcagcattagtgacatagaatcgatcgtattcggtggtacgtttctgtacatgaaagcagacgagactgtcggacctaacttcttaccaaggagtttagtctatagaaacgtgtatgcacgagtctcgaaattgaacgagtcgcttggtgattacgatataaacggtctctgggaaggcattcaactagtattcaacactcacgccttttggttgctactggtgaacgaacatcacagtttcgcactgtttagattacccgacgcgttttatcttttcaatccacacggaaatgtcaaagtgaactttgcggctctaactggttacaagacgataacggaacttttcgctcacgtacaatggttgtgcaaccgcacagacagattcaagttacttcctattcgactgaccaaggacgagacaccgttagacatcagacgcatcaagttggtcaattcatttcaagtcaacgtagaagatattgcaaacgaaagcaccaaagtgtttaatcgttgttacaaggccgaaagagtaacgttttcgatattcaacacgaggaaatcgacggactctgctaggagtgctgtgtattcctgtctcgcacttatctatgctacgtacttcgatatcggttcgagaatcgacgagatgatggtttatggcaatctgctttacaaccagatgctttgtcataacaaacgcaaaaggcatatcctacccatcgagctaccacgttacattcaaattcaaggcattggaat

SEQ ID NO: 4928 - DNA, 10093 bp, Mercenaria mercenaria
  source 1..10093: mol_type = other DNA
caaaaatatgcctttaagaattatttgaacggaaagctatgaaagtctttttttaaccgtcagttttcaagccaaaaccagttttaatgaaaacaatatactattttatatgcacaaattctggaaccagtaaatcaaaaggccaagttacctggacggtattagtgtaactgggtcattaatctcacaaagaccatatcagaattatttatatagcgcacaaattcataaactacatttcttctgtaatcacaccctcttttccttttttccattttctcttccttcttcttttgaaataaattttctttcggcattgtaagacggataaaatttaaacaaaaagaaacaaaaaagcaacattttcgtttcagatatattttgcattattaatgaaaagcgtagcatcactaccataacatttttatgattaaatgcaacactttgaacacttacccgaagtgacaaattattattctattttattctgtttgagagtgaaaaactgctccaaatacatctttgttttcaaaatatacaacaccatcgaatagttaagcaatttaatgcacaagcataataaataggcagcgtttccataataattatgtggccagtaacatgcactagtagaagtaactttaccaattagtacgctgtccaacgccgacgatatctgcaatttgccggaaagaaaagaatcaaatattatttatgtattttgtgtttctcacatggctagttcacactgcagcattcaaacttcagtatcttttgtatagctgtctctctacacatttacttttagtatattttgcttgtttcaatatttgcagcataagactattttctgttggtcactgcaaacagcatggcgcaacggtcttccgtagttatttaatgacttatacatcaaacagcatggcacttaaatacaataattttcgtttgaaataataatcaaatttattatattgatgttttgaatacagtttatgtcataaagaaacaaaaccgttcagggcacttttttcttcaaaacctcacatttcacttcatccgtttgtctgtcatgaaacttgaaacattttgacattaaaacttatacctagaaaataatgtaatacttttgtagactcgatacacaaaacttgtttgaaatgcgtgcatacttacacttattattaaaagaagataagttgtcattttactgttaattcaaccttttgcgcatgaagatttatttgtcttgatgtctctccgatttaatttatttatttatttttaggtttaacgtcgcaccgacatattataggtcatatggcgaatttccagctttgatggtggagggagaccatgcattatgtcatcacgagcaggcacctgggtagaaccaccgatcttccgtaaacctgttggattgcccctcacatgaagaattcaaccccccgagtgaggctcaaacccacatcggttagtaggggcaagtgatttgaagtcagcgatcttaaacactcggccatggaggccccctcttccatttgaatactttacaaaacaacttacattatacatcattctaaggacatcaaatgcttttgatgggaactttttatacacagcataattatcttaattactatagaagttgtcgttgaaaaaaatttttttgtaaaatttcagaaatttggagccagaaaattttgaaaaataaaatcatttttgactgtatatgtggctcggcccatgacgtgaactttcaaattatcttggcataacagcaacatagatactgtcaacagcaacatagatactgtcaacagcaacatagatactgtcttataaagaataaaacatgcaagaaaatacgtatttattgtttttctttggcccaaccttattcatatgttacaccctttcctacaaggagtctgtggttagtagactggactaaaaagccagcgatccgggttcgactccaagtccggcagctgatatccagactaagtgttctgtgttggatgatttacttaaattggtagtgtttccagcagtatcggcctagactggatgactacacttgtcgtgtacatggttgttctatatcaattccacgtgggtgctttcatcgactacccacgctaaacaaaaaactccatctttaactttttactgatcaataaaaatgatccaagacagctttaaaatttaaaacgatccagtctcggcggacacctgcagagtggctaataaagtgcggatataatttccactcggatcatctactgtattcaagcacgagtttctcatagcttacaaacattttgataaaagtgcttatctgaaagaaaaaaaaatgtttcagtgcacttacattttaattgcgactttttcatcctttttcagattcttggctaaccatgtcctgtaagaattcccctcgtcgatgggttcaggttccaatattttatacttattcatattcagaattccagggaaaattttatatcaaaacaattaagattttgtagtcctgatagttttattagttgtgacagtaaatccaacttgttcacttatgatgtgatgttcatgtttccactgatcacactgttcaattcaattgtttatggacagcgctgattgattattttcaatataggtaaacctaattatggtggagagcgcatgtcacggtccatagaacaatttccagcggcggagcagctatacgtgtgtgcgagacgttgatgtgaggtggataccgccgcggggtagagacaatcacgtgttgcttactgcgcaacacagggtgcgctgtcatgaagatggtccgaatgtgaccctctcctggcggcttggtacctctgcatatagcgggtacaatcgctcgttcaaaatcacagatactgagttcattgtcaacaatttattttgatcaatattgtaattatgtattttatttataatgcctaaacaacagaaatgtcttatagacccatagggctgggtgccactttgtttataaatattacattctgttttgttaccatgtgcacaaaatatgattacactacgctattgttttctttcttatttgttttgacattgcagagactttaaaagatttacgtcccttcaataccttagggaccatgacagtttcataataattgtgagtgtacaaatatataagatagcatgactgttttatgcccccaccatcataactacaggggcattgcttaattaagaaaagtttatccaagtctgttattgcatgaatgcttgcatttgccctttgtgcgtcttcagtgttgactttttcatctgtctcagaacagcatatgacaatttcatagaccaaaacacaacaattccgaattttaaagaaaacgaagaaataagaaatatatttaagagaacacttagtagttatatcgtgcttaaatagaaatatcatattgacgtgaagttcgttatatcgtgtgactgaaataagtactgcagacaaatactaaaaaccataatataatttggaaatagatatattgttgtagaaaaaaatcaacatgaaataacaattacttaagcaattgcatgattttaaagaactttgcagtgtaaagcggtatttcgtaatattgtgacacaaaagaccactataacaagatggcgagtaacttgcaaaagcaaggtcgccagctcgaaggtcaaggtcgcggttaggttccgtatttcgaaatacctcagcaataatgactactataagaagatgatgtggcgaaagcaacagccatgtcgctagctcgcatctacagcgcaaagcctgtcctatacatgttggtatcaaagttacttactgtaacaagatgttatgtcgcttgaaaatctatatcgctacatcaaattttattattcttacagtatatttgtatacatccttaattataatcgcgagtaattctctgaaaagaagtccacattctcgattgtcattaatcatggcagggccccgataatgttgctatgaattccgattgaattctgactcaacgctatgtatattttctttgatttatctatgcatgtttgctgaatgcatatgaatagaacagaaagacttaacaaaggacacatgcttctttgactttttaccaaatatcggagacattcgtgtctttagttccaaataaaagtcggaggcactcatgtccttcgttccacatagatatcgtagaaattcatgtccttcgttccacataaatatcggagaaattcgtgtcctgaattccacatagatatcggagaaattcgtgtccttaaagatatcggagatattcgtgaccttagttccacatagatatcggagaaattcgtgaccttagttccacatagatatcagagacatgcgtattagatctgtaacagtgtcatgaaaactgtgcaacgtcgaccgggattcgaacctcggaccttcgcttaccgtgccaacgctctaccaactggacttccaatggccatccgatacgagaaccgctacacaccttccctcttattgcgagacattgacactcctggccaatgtctgccgcagactgttaaccgaattcggacgcacgccccagccaaactgcttcgccccgcagggactccaagggtgaacatcacggcagaacctccaaatgtaacagtctgaggaaaaatgtgcagcctcgacctgggactcgaacctctgacattcggcttaccgtgccaacgctgctaccaattgagctaccgaggccaccctatacgtgaaccgctacagatccacatagatatcgtagaaattcgtgtccttagatccacatagatatcgtagaaattcgtgtccttagatccacatagatatcggagaaattcgtgtccttagatccacatagatatcgtagaaattcgtgtccttatttccacatagatatcgtagaaattcgtgtccttaaatccacatagatatcggagacattcttgtccttagatccacacagatatcgtagaaattcgtgtccttaaatccacatagatatcggagacattcttgtccttagatccacatagatatcatagaaattcgtgtccttatttccacgtagatatcgtagaaattcgtgtccttagatccatataattatcgtggggagaggcgggggttggggggggggcattcatattcgttggacactgtatccaatacaaatagatacatgtgccgacaaagactgacttttgtgtcaatgatagaaatgtttcattgcagaaagtggatacattgtatacgcaggaatatggtaactgtttactacaaatcttatacattcaaatcagtaagaattacttgtttatgtcgcgaaatgtttactctctataacttaatgattataatgtatgaattaaacttctgttcttgtaatgtatcaagaaaggacacctcacttcgattgtttttatcctctgtcggctccacacctgtatcgtcagcatgcgtgtcattgttttagtgatcactatggtgacgcttgtttacggtatagacaataaagtgatacccgacctgtcaatcgataccgcatctgaataatttacttgtacaagatctatcgtagcgcatcagttacccgaaatatttaaacctaattactactcccacatcgatgtttaactgactagctagcaaactgtgacaaaattaattcattagcggtctttgtttgtttaataaaatatcttcatctgtcatgcttcttcccaggtactgatcacagagaataattcttagaagaaaaaagaacaatgggtttaaacggcgccatgatcatagctggcattacactgttcgcagaacaaattaaatatgactcttacacattattcggttgggcaagcagattttttaatcacttcgaagttgctagagagcatttagataattagcacataccccacacactcaccctcccccgccctcccgcacaaaaagacacaaaattttgtaacatacaagcatatttgatcttgcaatgcagatttattatggctgggattaattatccaggtaagtgcaaaaatgcggatgaataaatgcattaaatactgaacaatttaaagttcgaacagctactatgaaaagtactaaaatgtttaataactaaataactgagacctttcggggaaattcagtgttgataaaaaatactttcgttttatataaaaggtagtctgtggctctgtgtcactgcccgtcatgacttgactgcccgtcgtgctttgaccgttatttctcttatttcaagttatttgacattcattacatatatattgtttgtcacgcataagtttaattgtaggaatattgcgatgatcagttgtatgaaaagttatatctttagagtgacttataggcccgacgtggccgggtgttgtaaaatgtttctattgattttgtactttgtacatatgttatacacaatgtcactatactaatatttacttacttacttacttacttacttacttatatagtcaccaaatagtcccacaactttcgaattcttctttaaaatattcagagtttgccgacgataagaacaattgacaagagggccatgatggaactatatcgctcaccagagattaagttgcttgcttgaacaaatctctttcctaaaacttagaacaatactaaatatctaaggtctgggccttatggttctggacaagaagatttttcccatataagtctatgtaaaacaagggatatattagcatatatgcctccgtggccgaattgttaaggtcgctgacttcaaaccacttggcccatcatcgatgtgagttcgagccgtactcggggcgtagaattctttatgtgaggaagccatccttaggggtacctggagtcttccttcaccatcaaagctggaaattcgccatatgatctaaaattgtgtcggtgcgacgttaaacccaccaaaataaaataaatgactcccatgtcatgatttgaacagtcttggtagagaaccactggagcatgccgtatactagatatctaagctctgggccttatggtttaagacaagatttttttaatgtttttcctatacaactctatttaaaccatgtgcctccggagcggggccagttttaactccagggggggataattagatcaatcctgttaaaggacttctacacaatagtatataccaaatattaaagccctaggccatgtggttttgtactgttttctatataaaccgcggggccatatttgaccctatgggaaaatttgaacaatcttggtagaggaccactagatgatgctaattaccaaatattaaagccctgggccctgtggtattgaactagaacattttcacaattttccctatataagtctataaaaaccgtgtgatccccagggtggggtcatatttgatccctaggggtataatttggataatcttgctagaggatcactagatgatgctacataccaaatatcaaattgttgtttaaaggaaagtgtggacgggcggacggtggacggacgccggatgatgctgaactagctcaccccgagcacaaagtgtgtgagctaacaaggcagttcacacgccatgttttcaagcaacggaagtggattgagcccggcttgataatgaaaacccgcgatatagggagaataagagagatttccagcgtgctcgagttttcaatactttacatcaggaatgtcattttacagaatatttattgttttaaacaataatcgattactcttacaaagagcattgtctcaactccgtaccgtatacatatgaagcatgcattcacgtactgtattagatttcaagttgaaagtggctaaaaattttgtgaagtgtataatatctgtttaatctgaacgctaaattgtggatctgccttcacttcactgtgttattgcctgcacttcattgtgtacctgcctgcactacattatgcacctgcctacactacactgtgtacctgcctacactgcactgtgtacctgtctacactacactgtgtatctgcctacactacactgtgtacctgcctacactacactgtgtatctacctacactacactgtgtatctgcctacactacactgtgtacctgcctacactacactgtgtgcctgcattttgtacctgcctacactacactgtgtacctgcctacactacactgtgtacctgcactttgtacctgcctacactgcactgtgtacctgctacattacactgtgtacctgcactgtgtacctgcctacactgcaccgtgtacatgcctacactacactacactgcgtacctgcactgtgtcctgcctacactacactgtgtacctgcctacactgcaccgtgtacatgcctacactaaactacactgcgtacctgcactgtgtcctgcctacactacactgtgtacctgcctacactacactgtgtacctgccttcactagactgtgtacccgcctacactacactgtatacatgtcctcaatacacagtgtctgcctacactacactgtgtatctgcctacattacacttggtacctgtcttcactactctgtgtattgcctgcattacactttgtacctgcgtacactacactgtgttcttgccttcattacactttgtacctacgtacactacactgtgtccttgccttcattacactttgtacctacgtacactacactgtgtacctgcctacattagactttgtacctgcatacactacactgtgtacccgtatacgctgcactgtgtagccgctcgcactacactgtgtacctgcctacattacactttgtacctacgtacactacactgtgttcttgccttcattacactttgtacctacgtacactacactgtgtccttgccttcattacactttgtacctacgtacactacactgtgtacctgcctacattagactttgcacctacgtacactatactgtgtacccgtatacgctgcactgtgtagccgctcgcactacactgtgtacctgcctacactatactgtgtacctcttttaatatatcgtcaaatcaatgagatgcgggtcacttaaattcatccgtgctgatgttcaaaaaagtgtgatatgagtggactagatttgagagggctaagacactttcatacggaggggaaggccccagattcgatttctggctactcccattgcggtgtgtccttgggcaaggcacttcatcacgattgcctcagccgatccagctgtaacaggttccagcacatttgccgggggtaatgtataattgattttaacagttcttaaaggacagggaaagtctaaaattaagttcagtttcatatgaaagccatcttcaagcctttcataacgctgaaagaatttgaaaatcggacaactattgtaaaagatatggcagtttgaaattttaaaaaattgctgatcattggaggcagccattttgtgtgtttatggcgtcatttacacactgctgaattctttcttttttttagcaaataaccttttaaattagaataattttatatgtttctggaagtgtaaattgtaaaacatggtaatttctttcattatagctggaaaatatagagaaattattttacaaaaataagtaaacacaggttcaaatatgtatctagaaattaaattaatccgccattttgttttctgttgccactggaaacaaaatggccaccattttgatcaaatatttaaatgctcataactttcttatttttaagtcgattttgaaaattcttttacttctttaatggttaaagaaatcccaacagatagaattaacatcaaaatagcattgtctttccctttaaaatagggtcactcgaaagctctacagatttcacaaagtgacggtaaataaaatttgcctttacctttttgtttgtctggatgcagtaaagtgatctaggcgttcacacagaatacatgtgagacctgtaacttactcgagaatcctgaaaatttgcttagcctttagt

SEQ ID NO: 4929 - DNA, 13868 bp, Mercenaria mercenaria
  source 1..13868: mol_type = other DNA
ccaaatatcaaagccctaggctctgtggttttggacaagaaggttttcaaagtttttccctatataaatctatgtaaaatatagaaataaacaaagggccataactcactcataaattgttgaaccagtctgattttcagggggacacaactagggtaccaatacatcattctgacaaagtttggtcaaaatccccccagtagtttctgaggagatgcgataacgagaaattgtttacggaaggacggaaggtcggacgtcggaccacggacgcagagtgatttgaatagcccaccatctgatgatggtgggctaataaagttaactattgttttcttgttccatttcgtttttcaaagtataattaccgtgttggatagttattctttgagaaatggaacggaacagtgtagaaatatcgattttgcgaagttattggaatatgtacgtatgcacttgaaaaataaaattctatggtggttagatttccgaaaaggaaaaactaagcaacataaatcatgtattaaacaagctgcatgaaataaaattgtatgccccgtgtggtgccctaatggttgttccgttccgtttctgtccgcaaagtataaatagccgccatagactgctcacgaatttcacaaactgcttgaacaatttcagtagtcatgcaagaaaaatatctggaagtattttttttaaattattttctgacaagaatcaactatatgtacacaggaaatactgtaatatgtgaaaaagtgacatccccttttggtggctatgttttcgacacactggaataatctgaacaatcttgatacagggtcatcaaaggaacatttatatatagatgtcatattatttagatttcatagaggcagacattctatgttttatactaaaccacatgtaaagcagggtaaacagtcctcggagtcacatcggcacaatgtatgtcatatggagagttttctacctttctgtagcggaggaatacgccagctgcctctccaggcattgtttaagtcatggacaagcacctgtgtggaaccattaaccttctgtaagccagctagatagcttcttcataagaagaattctacaccctatgaaaggtttcaaacccatattggtgtgggtcaagtgatttgaagttggaggccttacccactcagccatgaagggcttaggagcatatttctctagtatcaactccatcgaacaaataatcaacaactacaaaaacaaacacacaattcttatggaaaattttaatatgctttttatcaatataaatcaattgacttttcatagtaagttcactatcaccatataattatcttcttataaacagttcattgaaataatactctgagctgctttacaaatggttcaattagacataatacagcaaacagcaaaacacctgtaatctatttcacaaacttaaatgaaaataagacatacatgcaacacctctttgtaattaacatgtgtgaaatgaaatacatattctgttatattcagaaaatgacaaataaaggtaaagaaaaataagcttttaagcaccaagattcatcagctatttttttttattctctcggattacagatggttacattaaatctggcatacaatcctgaaatgtgttagtcaatcgccaaaatgttgcacaaaatgcttcaaagtacataaaactttgaataaaaagttcctcaactagaaaacaatcactgtaatcatgttgaacagagcttaactatcatagaaattaaatgcaattatattaaaggtatactagacccaaatttaacatttgaaaatatgaattaaattactacataatatataagtaaacataaaattaacaagtattgacagtattatatacattaccgtaggtttaaattggtacacattgatacttgtgtagctaaacgcagtaaaactgtactatcactaaaagactggaagtgttttttttttaaataaatatctgttacagcagattagattatgaatttagctcttcatcacaatctatttatatattcaatcaagttaaatacaaatctaaaatgagccagcttcaaataaagacaaatagatagattatcaacaagattttgaagtgaagctctgttaaaaagttgttctttactatactgctagaagtttatttgccaaagtggcgtatgctggtgtacaccaatttaaacttccggtaccggcgagttgcttgattaagtcaagtttcagctgccggctaaatccgggccacatcgaatgtgccgtttgagaatcaccggcgaagcgatgcaaaacatggtgggaaagtaggtaagacacaattcttgatttttacatattccttaggacctataagtttgtatgcgccccctccctaccccacaagttatatgatctacatgcaagagcatattcgtttaatttgactcaacataatggtgcttttggctgtttgttttgtgaacaaagagaaaattttgttaaaagtggaaaaaggaagttgttgggcatacctctggattataccacaagcttctcttagaatagttcaaagtgttgcaataaatgcagagtcagctcttgctactaaatcatcaattcttggattttttgaccaaagtgttatttcatttttaccaaattttggtatttcgttaatgtaggcattgattatatgcatggaatatttctaggtttggtcaagaaactaatgtgtcagtggtttgagggaaacaattttcaagaggaataatttataggccacctagttaaagaagttaacaaacatctgaaatccataaaacacacataccttatacacagaatcatattggaaagcttctgatttgagagcatggttgttattttgcaaggtatattgccagatcagtatttgcaacactattgctgtttggtggaaggaatttttattttacttcagaatagaattacacctgaacagctaaatagaacagaaattctgtgaaacattattttcactaggtctttgcctctaatatatatagttagcatgttatttcatcaaccgtatcaagattcgctacctttaaaggctaaaaatagccagataagtcatgtgaccaactcgtataaataccatgcacaattcatagttattctagcgacgtgtcgagatagctacacttcaaatacctggcgtttttggtaagaaaccacgtgttcatattttgaatctattttttgaatttgtttgaactttactattttcatttttttgttctaaagctgttagagcttgtacccaaatgtagaatatattctttcatttattttttattttagtttctacttgtgccttgtttcacgcaggttcattgcttctttttggtttttgtctgcgtacttttaccatatattttctttgactgtctcagtctgagtcggaaaatgttgacggggatcgaaaggacgatgtcctttcactaggtgattattcagacgaggaaaactctttctcgggttcttcgtcagaggaaattcctcataaagggaaaggaaaaactttcaagtcgtttaaaaagaaaaaatcctccatacaaaaacaaaaagttcctctgaaaaagattccaagtaaacctaaaaataaatcgggtaaaacccgatgtgccggttcgcaataaatcgtcatgcgcagtaggcgcttccggtggcgtttccggtgacagtaataacaatgatagaggggatattaaaaaaggtaactttgttgatcttgacaatttatcgtataatgacattatcaattaatgtcaggtgttgggcgttgccccaccggatgaggatgtccagacttggtcttttgataataattattgggctataggtgtagagtttgaaaacaatggtgtactaaacgataatgttgcacgtgagcagaatcaagcaagctacaaagacaaaacaactggcatccctaccatacactcaactgcatgtaaggttttggtgacacccaaaaagaacatactgaagtcaagagtgccaatttctttccggctgccagaaactcagcaggttgaaaaaatcaggtaactcagacgatatgcaagctcattggaaaatgaagttgataaactacaaaggcatctgaagaacatcatactcaaagacggcttagctttaaatgaatgggaaagttatgatatggaacaattaatgcaggatgcacattctgaaatgaaaaaatcatatccagacagcaccagtatagtattacagagatttttttggactagcaggctcgatacaacaagctgatgaataaaaagtgtatgcgctggccccaatgataataaaatggtgcaaacggggctactttcatcgtacagacatcactgctccatgacatataagactctacagactgactagacacttctagatgccagcaacatttcgaatatgtttgttgatgccccactaaacactactgctgagaggctagctgacactaatggaggctactttcgttgtacaaacatcactgctccatgacataacaggttctacagactgactagacacatcttgtcgtggagatgccaccgacactcaggatatgatctttgatgccccactattgtttagaacttgttcaaactccactccaatcctgactaaaccttgggtttcacatctggagcctaaagttctaactttttggtattgtgcattgcattgtcttaaataccatcttcctaataaaatggtaaaagtgaaactgggcacatctgaggaagctggagctgtcactagaatgtttaatgactccaataagagtaaagttatgggacaataactcgagtctgtgtcaaaagtattacgttttaagagataaagaacattaaataagtataattctaagcaaaaagggggataattcacaagtgatttttgcatcaaatcggttttatgttattttggtcccagattgagaagccatcattcaggatgaatacttcatgtcgatgacctgcggtaattgcggatctaaaaacaaacaattaggtggaaaatatacattttattgtcgagattgccgcttcaaaactcacaggaacataggcgagaaatatactatctaaatatttgaaactgtttccgttcgcggcatagatgttttttcaagcctgactcaatctgactcaatgcggaaaattatttgctcccagtttgtttaatgctcaatctggggcaaataatgtcatcgggcagaatgagttaaccatacatttacttcattatgcccatatttacttgtgtcatgcgggcgaacaggtaaggattaatagttgtgtcattgactgatctctagtactatgcctacataacaggatacttcttacgtatgtgtccttgtaaatattatatctttcatcttacgtttactataagatcgcaaagttataaattaaagtggttggccaattgttgttgtttttttttgctactggtactcctcatggaaaactagataaggacctgttgagaagctaaagagatcagaatctatccgtacattattttagaaaaaaaataacaatgtcagcagataatcaaaagaagatgaattttgcaatgatcaataaagaatgatcatacccgggtaaaaagaatgaacaagatgaaccaggcaagaaggtgatacagagtagtggtcctctaatgatactggattgttgggtaaacaattatattaacaacattttcttacaactggctcatctgaaaatacaatttatttatagacaagaagaatactcagatgattaaaagatttgttagaacagtgaaacaaatgaattactatcatcattgtgacagtggtggatgacacattgaacaaaaaaaaagaaagaaaaacttgatcagacaatttcgttttcgcacaaaactgtacaggaatgtttttgtgcattgtgtattctagagttaacaagacaaaacaaacgggtcattgaccctatagcgctcacctgtatacaaggcttcaagtgtgtttgtttaagtacagagttaggtttcttctatgttagcctatattatatacatgtcacacacactttaaaaccttggacaataagtccaaaagggggcataattagcccaaactacatgccagagttatgggacctgacccagtgaggttggtaattgatctagaacaagagctgtcactaatgttgacaaatgcccccgcagcgccttgacctttgacctgctgattatgacctttgacctggtgaccccaaagtcagtaggggtcgtgtactcaataggtactatcagcatgtgacgtttgaaggtcctgggtgcagtagttcgcgagtaaagtgccttcatgcaaaaagttaacgttgtgacgaactaacggacgaacagttgaaaactaatatgcctcccttcgggggcaaaaaaataaaaaataagtatcaaatctatatgccttttagtaatagctgtatgtacttgcacgtgaaactttaaccagaattttctaagtccaaaagggagcataatttggccaaaatgaaggtcagagttgtggacttggtgctatcaactagttttataaccccgaagacacgtgaagtttcaattcaatatctgcattagttttggagatagtaacttacatgtaaaactttaaccagaattttctaagttcaaaagggggaataatttactcaaaatacatgtctgagttatggaacttgacccagtgaggttgggaattgacctagaaaaagaaaaaataagttccaaagatatatgcctttaaatgatagctgtatgtacttgcatgcaaaaacttaaccaaggtgtgacgccgacgtcgacgccagggtgagtagaatagctagattattcttcgaatagtcgaggtaacaagagcactgcaatgcaatgcaaatgcagcgcaatatacacacaaaacaaagtcatatgaccttttacccctaagtgtgaccttgaccttgaattgagccatccgaaacatgcgctctgcatgtcgtttcgatgaggtgaacatttgtgtcatgtttctttgcaaccattcaagaggttcaacagttacagagcggaagggaaattgctaaccaacagacagacagacagatggacacaaaggtgataacataatacgtctcttcggacgtataaaaaggaatcgagatcttatggtgatacaagttgtggcatgtttggttaaaaccaaatcataaatgaagctgctattatgcagacaaggtcaaaatagctaattctggccttttcaggggcaataactctggaacccataatggaatctggccagttcaaaaaaggaaccgagatcttatggtgatacaagttgtgtgccagtttggtaaaaatcaaatcataaatgaagtttctattgggcagacaaggtcaaaatagctaattctggccctttcaggggccataactcttgaacccataaggagatatggccagttaaagaaaggaaccgtgaccttatggtgatacaagttgtgtgctagtttggttaaaataaaatcataaatgaaaccgctatcgtgcagacaagaaattgttgacggacgcacggacggactgacgacggacgaagggtgatcacaaaagctcaccttgtcactatgtgacaggtgagctaacaaaaatgtactttgatacagttattctattctgtagtcattatcatgattattatttcagtttatattctaatattattaactgaataaaatatctatctggacagagcacactgttacattttattgccccccataacctatatacagtgttacatattattattttatctaacccacatatatcccatgggccttaaaaataattgtagctttatagacttattgtataataaggttgttctctgtagtcatatcactacaagagtaccgtaagggcacgtgaaacagaaattgccattcacctgtcaaccatgtcaacaaaatcaccaccaaacaaggctactttcgtcgtacaaacatcagtgctccatgacatataagactctacagactgacacttctagatgccagcaacacatcgcatatgtttgttgatgccctactagacacttctggtgagaggctagctgacactaatggaggctactttcgttgtacaaacatcactgctccatgacataacagattctacacactgattagacacatcttgtcgtggagatgccagcgacactcaggatatggtctttgatgtcccactattgtttagaaattgttcaaactctactccaatcctgactaaaccttgggtttcacacctagagtctaagtttctaactttttggtattgtgcattgcattgtcttaaataccatcttccttataaaatggtaaaagtgaaactgggcacatctgaggaagctgcagctgtcactagaatgtttaatgactccaataagaataaagatatgggacaatagctcgagcctgtgtcaaaagtattatgttttaagagagataaagagcataagtataattctaagcaaaaagggggataattcacaagagtgatttctgcataaaatcggtttcatattattttggtcccggagtgagaagccatcattctggattaatacttcatgtcgatgacctgcagtaattgcggatctaaaacaaacaataaggtggaaaatatacattgtattgtcgagattgccgcttcaaaactcacagaaacatcggcgagaaatatactatctaaatatttgaaactgtttccgttcgcggcatagatttttttcaagcctgactcaatctgactcaagcggaaaatgatttgctcccagtttgtttaatgctcaatctggggcaaatgaatgagttaaccatacatttacttcgttatgcccctatttacttgtgtcatgcgggcgaacaggtaaggattaatatttgtgtcattgactgatctctagtactatgcctacataacaggatacttctcaattatgtgtacttgtaaatattatatctttcatcttacgtttactataagatcgcaaagttataaattaaagtggttggccaattgttgttgtttttttttagtttttttttactacaagtaattggtgggggcataatgcactaatgaaatattatgaaagtgtcttactaaataaaaattatgaaataatttgctactgattcccccccacaatactggtattcctcatggaagactagataaggacctgttgagcagctaaagagatcagaatctatccgtacattattttagaaaaaaaaataacaatgtcagtagataatcaaaagaagatgaattttgcgatgatcaataaagattgctcatacccgggcaaaaagaaagaacaagatgaaccaggcaagaaggtgatacagagtagtggtcctctaatgatactggattgttgggtaaacaattatattaacaacattttcttacaagtagttcatccgaaaataccatttatttaaagaatactcagatgattaaaagatttgttagaacagtgaaacaaatgaattactatcatcatgacagaggtggaagacacattgaacaaaaaaaagaaagaaaaacttgatcagacaatttattttcgcacaaaacagtgcaggattattttggtgcattgtgtattctagagttaacaagagaaaacaaaagggtcattgaccctatagcgctcacctgtgtacaaggcttcaagagtgtttgtttaagtacagagttaggtttcttctatgttaacctatattatatacatgtcacacactttaaaaccttggacaataatatgaaaaattatggtagacattataaaaaacctgatagcacaagccaaatatcaaggctctaactattattgattcagagaagaaaagtgaccacgcccccaggcagccatgcttttttaaacaagaggaccatgatggtcctgaatcgctcacctcttcccacatgacccagttttgagtatgacgtcgttttttctattatttgacatagtgacctagtttttgagctcacatgacccagtttcgaaattgacctaggtatcatcaaggtgaaccttcagatcaattttcatgaagattcattgaaaaatatggcctctagagaggtcaaaagattttaataattttagacctactgacctagtttttgatcacagttgacccagtttcaaacttgacctagatatcatcaagatgaacattcagaccaattttcatacagatcccatgaaaagtatggcctctagagaggtcacaaggtttttttattatttgacctactgacctagttttttaaggcatgtgacccagtttcaaacttgacctagatatcatcaaggtgaacattctgaccaatttttatggagatccattcaaaagtatggtctctagagaggtcacaaggtttctctattttaagacctactgacctaggttttgaccgcacatgaccctgtttcaaacttgacctagatatcatcaagatgaaaattcagattaactttcatacagatcccatgaaaaatatggcctttagagaggtcacaaggtttttctattatttgacctactgacctagtttttgatggcacgtgacccactttcgaacttgacctagatatcatcaagatgaacattcagaccaactttaatacagatcccatgaaaaatgtggcctctagagaggtcacaaggtttttctgttatttgacctattgacctagtttttgaaggcatgtgaatggcctctggagaggtcacaaggtttttctatttttagacctactgacctagtttttgaccgcacgtgacccagtttcgaactagacctagatatcatcaagatgaacattcagaccaactttcatacagatcccatgaaatatatggcctttagagaggtctcaaggtttttctattatttgacctactgacctagtttttgacggcacgtgacccagtttcgaacttgacctagatatcatcaaggtgaacgttctgaccaattttcatgaagatcttgtgaaatatatggcctctagagaggtcacaaggtttttctatttttagacctactgacctagtttttgaaggcacgtgatccagtttcaatcttgacctagatatcatcaaggtgaacgttctgaccaattttcatgaagatcttgtgaaatatatggcctctagagaggtcacaagctttttctatttttagacctactgacctagtttttgaccccacatgacccagtttcaaacatgacctagatatcatcaaggtgaacattctgaccaattttcatgaagatcttgtgaaatatatggcctctagagaggtcacaaggtttttctatttttagacctactgacctagtttttgaaggcacgtgacccagtttcgaacttgacctagatatcatcaagatgaacattctgaccatttttcataaagatcccatgaaaaatgtgacctctagagtggtcacaagcaaaagtttacggacgcacggacgcactgacgcacggacggacgacggacgacggacaccgcgcgatcacaaaagctcaccttgtcactttgtgacaggtgagctaaaaatcggagtaatttggtcagtcttggtagaaggtcacacaagaaccatttgtgtaaaattattctaaaatcgggcaagcagtttcatacaagaagatttttaaagtttccactatatacatatagggaaaagtaaccatgtcctttggcggccatgtttttctgatgaatcaaaataatttgaacagtcttggtagagggtagcacaaggaccatttatgttaagtaactccaaaatcggaccaatggtttaggaggagatgtcctttgaagatttttctatttatagctctggtagcctctatttgcaaccaagcgaaaccaattgaacaactttggtagagggcccctcaagtaacatacaggccaagtttcatcaaaatccattccattcagtgatttcggaatagatgtcatttaaacacaactgatgacgacggacggaagccttgatgggtggacacacggcggacgccggacacagcatgatctcaatagctcaccatgagcattttgtgcttaggtgagcaaaaagaacaatgtttgcagataatcaaaaaaaataattttgaaatgatctataaagaatgcatgtacctgggtaaaaataagaacaagaagaactagacaaggagatacggagaagtggttgctcaatgacattggaatgtaggttaaacaattatattaacaacgttttcttacaaccggttacacaaaaacgagaactggttcatccgaaaattccatttatttatagacaaaaagaatactgggatgattaaatgatttgttggaacagtgaggcaaatgaaatcctatcatcatgacagtggtggatgacatatttaacccccctccccccaaaaaactttgacatatttaacccccctccccccgaaaaaaactaatcagacaaagttctttccacaaaacaattcaggatttttttttggtgcattgtgaattctagtgtctacaaaacaaataagagctgttcgtaagacagcgcgctcgactcttctcagggcttgactctgaattagagttttgccagtaaaaaaatccaaattaaaaagggacataactcttgtcaaaattcaaatcagagcaatgggaactgtttctactagtgtggactttgatagtaaataattattttaagtttcaggtcaaaagcttcaatagtaacagatatttgactttatcaaaatttttaacaaactagattgtgtctgtaggacacagggtgtgcccccactggtacatttgtcacaaataaggggacataattcaaatgtttgcagtcttaatggagtatagcctaaacaaacattttatgaaaaggattaattattctaagccatatactttttgagctattagcatcaaacacaaaatatccactattttggctatttcaagggccataactctgaaataagcgctaagattctcaagaagaatgccaatgtgcatttttgacgttttcttacaaccggttaaaaatgagaactggttcatccgaaaattctatttatttatagacaaaaagaatactgggatgattaaaggatttgttggaacaacgaggcaaatgaattactatcatcatgacagtggtggatgacacattgaaccataaaagaaacttgatcagacaatttcgttttcgcacaaaaccatccatgaatgttttggtgcattgtgtattcttatattctagagtcaacaaaagaagaaaaaaggtgattaaatgttctaaagaaatgttccccatccaatcattagagcaggatgaagggcataaaaaacttgatcagacaaagtcgtttccgcacaaaacagtgcacgaatgttttggtgcattgtgtattcttatattctagagtcaacaaaagaagaaaaaaggtgattaaatgttctaaagaaatgttccccatccaatcattagagcaggatgaagggcataaaaaacttgatcagacaaagtcgtttccgcacaaaacagtgcacgaatgttttggtgcattgtgtattcttatattctagagtcaacaaaagaagaaacaagctcacctgacctaggaatcatcaagattaacattctaaccaaataacattaagat

SEQ ID NO: 4930 - DNA, 10018 bp, Mercenaria mercenaria
  variation 4779..4878: note = n is a, c, g, or t
  source 1..10018: mol_type = other DNA
ttcatgaacattatgataaacataaatggaagtgtttatgaacattatgataaacacaaacggaaatgtttatgaacattaagataaacatggtacttaagtttactgagtttatggtgttgatgctgtatttatgatttgatgatgatatgttatatatatatacatttagtttggtcagtatgcgacccaagtgctttccgcaatttcaatatgaatttttgaaatgatagtgagttttgttgttcttttctcagtattccaaggagacggtataaggtttaagggaaataacattcaatgttaatctataccgtttagagaaacattttcgttagacgtatatgttgataagatttacatataattaaaccaacaaagtatgacttgtattgaaaatttagagatcaaacattaagcattgtaatttactaaatacactcttacatttaatataacagcaatgaatacggcaaaattgaaactgatacagagatctactaaaatgctaggtttccgtcgtcgctcatctcgataaaatcacaggtgcccgtccagtcttggtgcgcatatgggtgccgccccctcgaaaaaaaagttaaaaaccactgttttaatcctaaaatgaaaaaaaaaacaaattgaaaagtttttttcttatataatactcttagatggaataggtgcttgttcaaagacgccaagaacggcatatgttttctactttcgatttgcaacaaaatggccgatcgtcactgttattttgcaagtgtctagacaagttggcttgtttggatttaaatgtaagttattatcccccgccaatgaaatcgggagtgggtattgaaatggcatcagtctgactaaagtacatctcctattacgctacgcataggatctgagaacgacctattcattgcctcgttctgacgaccctttcgctcgccaatcagagcctaacttacaacatcttgcaaatctacctgtagccttgacttttcatatttacaattcttatgtcataatgtagcagatagccggttagctcagtcggtaggtcacttgctttgtaagcgagggggcccgggttcgagccctgaaataattgcacatttttcttactctgtgacaatcgaacaagtcgtcggattggataaaataaaaatagcaataatggaaatccaaaatatacagaagacgatagtgaaagggtcgttctcagatcttcgtttagaagatcaagtacttaagtcagattggaaatggtattgtccgtccgtcacgtccgtgcgtcaatgcatccgtgcgtccgtccgcagccttatctcagtaactagcaggtagaatttcatgaaacttgaaataaacatgaaccaacatactgcgatgatgcccgtcaagctttttttgattggtcaattttccttaagagtttttgcccttgatttaatcaaaaatgcacaaaaatgtccgtccgcaaccatttctcagtaactatcatgtagaatgtcataaaacttgatttttttttttttgattggacaatttcccttagagttgttgcccttgatttaatgaaaaatctacatctgcagcaatttctcagtaacaagctggtagaatttcatgaaactttaagtaaatatgaaccaacatacttcgatgatgcctgtcatttttgttttaattggttaatttttcttagtgttattgccctttaattgtttaaaaatctacagatttgtacataacaaacccaccaattggtagaatgtcattaaacgtctttcattcttttctatgaacatttattataaacacgtgaagttgtgtacccatacctagtcaccatcttgccttggtcacaccccctccccctccccccacccccccaaaaaaggggtaatttttcatgccgttacattttttttcaaaccttccatgaatatttatcaacatgcaaagttgcaccattccccgacctcactcctccacccagtcatgccccctcccccacaccccccgccaccccatttgtttctcatttttaattaagggcggtcgtggccaagcggttagggaagctgactttgaattactgttcacattatcacctggcttggatttagaatttatttgaggaagtcaactgtcgatatgctggagttactttaaacatctgtaatcaaatatgcaaagcttttcatgatagcggagtaacatggatagcttttttgtaatattcgggcaggaaaatatcaacacagggctgttttcattctctccttttcttaatatttttcctatcacttattttcaacttcatcgttatatcaaatattcctcattatcggttatctgaatgttacaaatagaagttatataattttcattttaggcctaatataatctcagctgcgaagggccaaccatctattgttgttaaaacttgcagcccgatcctacaagttgcttttggatataattttttacccatgcatttatgaacttgtaagattttgttcacctttgcatttacgtcttatgagttgttttgtcatttggagaaagaaataaaatgtgattaaagtgaaaaagccatccatcttgctggttgatagtcggcggctctatgcgggttttatcgctcgtgccacaaaaaaagctcagaagggcatctggccatgaactagaaatttaacatgagcatgcgtgacgccaaaaccgacaaaaaatcgttcagtgtgttgagctgacatggaatgcacatattccatagcaaatatactatcacagcgcgttccgctgtattcataagataccacgtgacgatgagaaattcacatgacactgtagaatagagatggtacctaaccaaataaatcaaagggggacaactctgaattgatcaataaactgaagccaacattaaacattgatcaaaagtgaaagaaaaatcagataggtccattttcaaacaacttaccaggcagacaaaatatgacctacatttgtttaaatccctttgtattcaatatacaatatgcacgcttttctcatgacttacactgacagttattttgtaaattgtagtgaggccctgaatgaaagtttagtaatgcatgaagattatatagaatgatgcatacattcctttgaagaaaattaacgacattaagaaacgttattaagttttgatcttttaaccaaagttgtttatttattgttctaaatggtgatacattgatttacataacatttatatatcaaaatgtaaaatgtatatatccaacaatgggaaataacaaaaaaagttaaattggtaacaaatattattacaatgttttaaggtagtggttgtaattactacatgttaaggtagctgacaggtaattactctatgtaatgtattttaagcaattctcaatttaaacattttctggagggaacaagcacgatcatttgctttccttgaaaaacgaataaatgctgaaaaagcatatggagattactctatttgatgattttcgttacaggtcaactaccctaaacaaactaaagggtgttttatttattgttgaaaacaaagtaatcggataatttcagatatcaacattaatttaaaggtccattactaagggaaagtgagttggcaatttttttcatagccagtgcataggcttctgcaagacactaaataatgaagattggcaggtcaaaatttacagaaggtctttggaactcaaagaaatgtatgtgtgttatgttgaaatttctatgaatcgacagaatgaccccccaggtcttttttaactttcttcatacttcatagaaaaataattgtacataaacagcgatttatttcgaatttctacataccaactttcattttccaataaaatgaaatagtttctgtgctttttaaaagaaattaaaatgttcactttcctaagtattggacctttaaaacttatagtgtttacacaacttgaaaaatgtttttattggggcctctcatttacaaatgtatcaataattatcacctgaattgagtgcattcatgagtggaaaatattgatggtaaaatggtgtaggggtttgtttacaatataaaatctttaataacttctttaaggtgcatttttggtatggttttggtaagcttataataaagagcatgtcattctctttcactcagatttttttcaagcgttttagactattggctagtcttggaatttgactttatttaaagacaaaaggaagttcagtataggctttttcaaaatgttaaaagtagagtaaacttatcttatactctattgaatttatttagctgtgggagcttttgatatagattataattggggaagtcctaaaatctttgaaagacggtcaatacaagagttgtccatttgcttcagatattttgagaaagacatttttagatatcaaatatttctgtttttgacatggagaagaggaaaaccataaatatatttagaaaattggtgcacttaactatcatttcaccctgaaaaaacctataaagatgaatttgaattttttaggtaccatctctatgtagaatggcggagagccaaaaaaacaaattccggcagcctattacatttatcaaacgtccagtagatatttttttacaaaaatcacttaaatttgttatttgaacaattatgtgcgcgaatattaccatctagatgcgaattatgcaatttaaaaaatctggttaaacaactcatgattgcgtgatggaatggnnnnnnnnnnnnnnnnnnnnnnnnnnnnnnnnnnnnnnnnnnnnnnnnnnnnnnnnnnnnnnnnnnnnnnnnnnnnnnnnnnnnnnnnnnnnnnnnnnnngagcgtgaaagggccatcagacgctaatacgtttaagtacgttaaggctgcggaaaggatatgcgcgaggtccggagttcaaatgcccacatatgcccttttttttggctataagcccagtatttttgtcacaaattttggcgcagaaatctttaatgtgtattgtttaccaatgtaaactttgaacaaaattttagattcaaattcaaaggcatggaagagcatgtgttgcttatctccctttcacagccctagacttttatgagtttggtaaactaaattgggttttgactaacagagtttgtgttcttgataaaattctggtcaagaacttcttagaatgaatttgaaataagaatttatcgtgtcagtggtggttctcccacacaagaggtttaccatagctaattagtgggacaaaatttgtccttaaagatgttatttgacaatataaatgacatttaaaagaatcgcaatagtctgtggttaggataacaggttaatataagttcaaaagtttatttgttggaagaacattagatatccacattaaaaatctatatcactagtttctaatatccagccgaaaagagacaaatttctatttaactgttgtttttcttttatcataaataacatgattaaccctggaacaatttgtttgtagtattagaccttcctggatcaaacgtataacagaaatattttagttatataattaattcttctcatcttgtgctgtagaagacgtatttctttttcttgcataccagacggggatttccggtatttttaccagtgctggaaaattccatcttacacactcgtgctgcaaatgatgtagaacgaacaacatttttgtagaagatttatgtaacaatttatattttatttcataatacggaataaaaatccaataccttgacagttcctctttgttcctgatagtatatttcttgattcaaaaaacgttattttatcaaaaaatcgtaatattacgctgcaactgataaaacaatactcccatactagtggcctctgatgcatttttgggactagattctgtgcacccaacgatttttccgacgttagtctagtattgaaacatttgaagaaatgatttgatcttgttcatttattccaaacatttacaaacatttgcctttgttcataatttacataacaaaaaatgttacaaaagactgaagaacaaaactgtcaaaactgaaaatatcaaaaagaaaaataaatgcagaaataagattctgtatgactaggttttcccatcagataggcagcgcctaatttcatattatttatcatttcgagatgatgtcagctactagaaagaacaatttaaactagttagtaatgagaaacatgtttcctatttagttatcttacacctaaaatttatgataattagtcaaaggagttctaatgatgcaccggattggcaacatatttgggtggcagaatatttgctgtcacaaggttgttcgtccataggtatagtctgttctgcgctttttttgcataaatccttctctactttacaaatacatatttgatattatgtactgaaactccttcaaacatttgtgtaatgtttgtagtccaccccatttcggatggtatttccggttgaaatgtggtatgcgtactagtgtgatctacttgatactagtagtagtattactacactccctcatagtaatgaagattatgtgtaggcgctggtgaatttaaaacaattatatatactatatagtggttaagaaataacactaaaatacaggcataactagtattgtaactgtgggaaacttaccaggtggaattagtctgtactttatgctgtttgggacaatagccaaataatattgtctagcaacaccagcaacgtcttttcgtgctgcccgcgccaagggaaatcactcttgctgagttccgggttcaggctatcgccccgtaggtcgtaccagaccgtacgcgagcactacactagataccagaaagggccctttccgtggtatttgatcggaaagggcctaacatgatcggaaagggcctgccaaaagttatcaatttgttatttttaaatgaattatagacaaaatatgagtcatggcataaaccgttctgatcggaaagggcctgctatatgtttattattggaaattattttattatttcttcacatttcatttaacaaaaaaaaaaagaaaataatttaagataaagaaattatcagtattcgatttttaaatgaattatggacaaaatacgggtcatgacataaagcgcgctgatcggaaagggcttaacatgatcggaaagggcctgctatatgtatattattggaaattgtttatttacttcttcatatttcatttatcaaatcaaaaagaaaagaacacacgaaaaaaaatatatcaattttcgatttttaaatgaattataggcaaaatacacaccagtacataaagcgcgctgatcggaaagggcctgcaatatgtttattattggaaattatttatttatttcttcatatttcatttatcaaatcaaaaagaaaagatcttacgaaaaaaaaacagacaattttgtatttttaaatgaattaaaggcaaaatacgcacaagtacctaaagcacgctgatcggaaaagggcttaacatgatcgaaaagggcctgctatatgtttattattggaaattacttatttgtttcttcatatttatttatcaaatcaaaaagaaaagaacttacgaaaaaaaaaaaaaatatatttttaaatgaattattgacattatacgcttcagtacataaaccacgctgatcggaaagggcttaacgtgattggaaagggcacgtcacatgtttattattagaaattataaaattatttcttcatatttcattttggcataagaaagagaagagattaagaaatatatatcaggcctttttttatgctgattttagggccgaaattcggccccattccccagtctaaaaagtatacttttttccccaccttggccaaaaattccccatgcaaaaaaaaatgaaattagttttgattttcagtcctgattttaacttttcagcaaatatattcctccaaacaatgatttcgcgacgtaaatttcccctccaaaagggacctggtacccttccccaaatttacaaaaaaagggctgtatatattatagattttaaatgaattaaagacaaaaaacctattagtgcataaaagcgctaattggaaagggccttatttgatcggaaaggacatgtcttgtgttccctataataaacaacagataaaaagaaataattaaataaattccagtaataaacatatggcaggccctttccgatcatgttaactccttttggcagaaagggctctttccagtatctagtcatagcgctaaaatacacctaccaaccacactcgacagtgttcaaatctgattcactctacgagagaaatcagacattttttgagattttcatcagtcgccgaagccattcgctaacgtcacaacaattacagcgccaggatattgatgatattgttaacctaatcaaatcctttatttattgggtttctaactatcaaagcgctgttagcgcttgtgccattttttagcacgactatacgaagtcggcttctttccgcgtccccaccttggttaaagttttggtgcactttctcttttttcaacttacctctgtaattacttgatggatttgattcaaacttataatacttattcctcatcatcatccacatcatctgacataagggccataactctggcaccaatatttcatgaattatccccccttttcacttagattttcaggttaaagttttgatgcactttcgctctatctctgttattactgaatggatttgattcaaacttaaaatagttgttcaacatcatcacccacatcatatgacacaaggtgcataactctggcaccattttttcatgaattattccccctttttacttagaatttcaggttaaagttttggtgcactttcactctatctctgttattactgaatggatttgattcaaacttaaaatagttgttcaacatcatcacccacatcatatgacacaaggtgcataactctggcaccacttttttcatgaattatacccccttttttacttagaatttcaggttaaagttttggtgcactttcactctacctctgttattactgaattgatttgattcaaacttaaaatagttgttcatcatcatcacccacatcatatgacacaagatgcataactctggcacaatttttcatgaatttttctactttttacttagaattttaggttaaagttttatgcactttcactctatctctgttattactgaatggatctgattcaaacttaaacaattgttcaacatcattacccttatcatatgacacaaggtgcataactctggaccaatttttcatgaattatttcccctttttacttagaattttaggttaaagttttgatgcactttcactctgtctctgttattactgaatggatttgattcaaacttaaaatagttgttcaacaccatcacccacaccatatgatgcaaggtgcataactctggcaccaattttttattaattattccccctttttacttagaattttaggttaaagttttgatgcactttcactctgtctctgttattactgaatggatttgattcaaacttaaaatagttgttcagcatcatcacccacactgtatgacacaagctgcataactctggtaccaatatttaatgaattatgcccctttttgcttaggatatacttataattatagtgtttttatacattttatctttacctctcttattactttaagttgaaatttttgacataggctcaggctattgtgcaatatcttcatccacaattcgagtcattaaacactccagtgacagctctagtttcctcagatgtacccagtttcactatccagcatcgaaatagtcgagcgcgctgtctcctgtgacagctcttgttttggaatggattcttttcaaaatggaaaaaagaatatttgtttttagtaaattaag

SEQ ID NO: 4931 - DNA, 10113 bp, Mercenaria mercenaria
  source 1..10113: mol_type = other DNA
tatttctatatgtgattttcgtatcggagtacatgtataccaattttatatgtatttctgggttttctacatatcttattcgaatctgagctcagatggtatctggaatgtaaaacgtgttgtttttctcttcaatttttattcactgtacataaaatatatacagggtacatttttgcacgagaacaaaaatcgcaattcagctacccttcactgaatttttcggagtaataaaatgacagtttacagacgatcaggacttaaatattttttttatctatttatgcagtgactgtttgaggcgtaaagatatcaaagcaagtgtgactggtatgccatccgatagttataggagaaaaaaataactactaacttgtgtcatagtgtatagcgtttgtttcgaattcaattactaagttttctcactttaattactgtttacaccctgataattgatagtgacactttccgctctaaagcgtttttcacgccattatggaaggtgtgaaaacttggacgatacaggtattcgtaaaattgcaactaaaacaagttgaaaacaggcttaaagggcataacaatacattcgtaggagcgcatttttcgtaaaattgcattttcgtaaaaccgcaactttgtaacatagaaataagaaggaaagcagccgggaccacaacaccttttcgtagtataccggtatttcgttaaattgcgattcgtagcaccgcgaatccactgtataaggtggaaatgtgcaaattctattcttagtaacagtgaccctgaccttaagcccagtgagttcaaaaatattctccccctttcttttattgttatacattcaaacatcaacttttacaagaaaatctatattttgagtggtgactgaccagaaacaaaaattctatttttgtaattgtggctctgatcttggtctcagaaaacctaaacatcatcaaaaccttccctacaatgtgtatgtacaaagtttcaataaaaatttcgaatgcaattaaagtcagtagaaagtgcatcagaaagtactcactttaaatgctgaagaaatgccctgtatacattagttgctgatgatgcaagatggttggttgttaaacactgcagtaactgagcctgtatttctgggttaccatctagaacctttaatacaaattgttgttttttatttataaaaaaataaaaggtaaggtacatgaacatcctaaacacagtcctagagccatgcatcactaaattttaaatactattaattttatgtaagaacagtcagataacataataagtgctcctagatttactgcatgtcctaccttgttctaaaaaagtaatacacataatctcttttcattttattggtattttgatacacaaagattattatgaacctggagtatgaacaagagctgtccgtaagacagccaagctcgactattcgaaatattgtcccagaagcaggaaaatattacccaaaaaggttaaatatcaaaagggggcataatttgaccaatatgcatatcagttatgggacttgctgctatcaactagttttataacctggaaggcacatgtgaagtttcaaatcaatatctgcattagttttggagatagaaactcgcatgtaaaactttaaccagaattttcaaagtccaaaagggggcataatttgcccaaaatacaagccagagttatgggacttgacccagtgcggttggtaattgatctagaaaaagaaaaaataagtttcaaatctatatgccttttagtaattgatgtatgtacttgcacgcgaaactttaaccaggattttctaagtccaaaaaggggaataatttgctcaaaatacatgtaagagttatgggacttgatccagtgaggttagtaattgatctagaaaaagaaaaaataagtttcaaatctatatgccttttagtaatagcagtatgtacttgcacgcaaaactttaaccagaatttgctaagtcaaaaaaggggcataatttggccaaaatgaaggtcagagttatgagacttgctgctatcaactagttttataaccctgaagacacatgtgaagtttcaaatcaatgtctgcattagttttggagataataacttgcatgtaaaactttaaacaaaattttctaagtccaaaagggggcataatttgctcaaaatacatgtcagagctatgggacttgacccagagaggttggtaattgacctagaaaaagaaaaaataagtttaaaagctatatgcctttaattgatggctgtatgtacttgcatgcaaatacttaaccaaggtgtgacgctgacgccgacaccagggtgagtagaatagctagactattctttgaatagtcgagctaaaaactaagaaatatgcaccttaagtcttgaggaaaaggcctacttgcaaggacagccatagaagaaactgtaggtgtattctgaaagcacatccttttaactaatgtaaaactagagctgcttttaagaaaagcgcatgcctcccacaactgcctaatcatctagattggcatttcttctccattatgtatctgagtcaaccatgcaccaaaacctgtatcactggcatctgtggttttggtaattcaagggccataattcccaagtgcctaggcctatctggctagttatcgaacttggtcgaggacttattggcaaacatgttctgttcgagtttggtgaagatcggatgagaactcttcgaattagagcacggacaagatttgtgacagacagacacacacacacagacaggagtaaatggatatgtctcccaccactagacataataatggaaaatacataaaaaacttaatccaaaaatctggaaggggttgaggatgctaggcaagtaggtaaactttcctgatacttcatacaatggacacagaaacctaagaaaacaagagaattatttatttaccttctgtgcatctacatacttcagcagaactgccagtatcctgtacctgcctttcacataccactgtgtactcagcaacaactttaatatgctactgggaaaatctggcacagcatctttaaacaataaattcaacatcagttttcttttttaacttaaatacactcttcattaaaaccaaaatggaaatccttgtatgtcaacagagggtagcaaaacatttatcattgtagaatgaaagtcaattcaatttagctattgtattttttcattaaactgttctgcatttagatgaccttgcaatataaagcacaagttctgacaaataacaagattcctccatattaattacctgccataaaatgcttaatattcatattgtgagttacctttcattgtttcccaaactgacatcatacatgagaatatgtccactacagcctcaggaacatcttctactggactgtcccagttcagcaccacaatctctaaggtactctctaaagtggaggtaatattatttgttgaaatgatcttctctaaactggagggagttttagtcagttttgtataccaaagcaagagaatttgaaaagcttgatagtgaagtgtaatatcccctctgcatagaacacagatgtactcaaacaaatgttcaaacaatagttgtgaagtccctttattgactgaacaatcagcaaatagaatatctgtcctgccacaagcaaccactcctcggattaaagatattggaccaagtctggaagaggtcagcaaactgagatcatcatgtacagatttctgttgcctggtatccagatctgtctgttccaatagttcttgtctgaatgttgaatctgaaaattaaaataggaataacttcagtttctctttagtaggcttgatgataaatgaaagtcctgaggccacatattggacacttcatccctttgcacgtagagtctggtaatcacactaaaactagaaatgtgtcacagacacggatgcccccacaacatgacaaaggtcacaggcatggtactgctcacaaactaaaagaaggacccttggccctatttatttacaaaaaaaaaatattgagggaaaaccagaaaatttagtaatctgtacatgtagtgaaaattggctaagttcaaccaaggactgtgaccttgacctttgagctagtgaatggtttttgagcatgacacatcgtctatccatgcttatcatttgtgtcacattattctgaaatcggaccatgcatgtcaaagttatggaccggacaaaaagaccacattatcagtatatatggagtgaaaattggctaagttcaactaaggactgtgatcttaacctttgagctagtgaaatgagttttgcgcaagacacatcgtctatccatgcctatcatttgtgtcaaattattctgaaattggaccatgcatgtcaaagttatggcccagacacgaagaccacttaaatgtagtgaaaaattggctaagttcaaccaaggactgtgaccttgacctttgagctagtaaaatggttttgcgcatgacatactgtctatccatgcttatcatttgtgtcaaattattttgaaatcggatcatgcatgtcaaagttatggcctggacacaaacacaactcttttctgaacacacaaacaaacacagacaggggtaacactatatgccccccacccctatttttatggtgggggaataaaaaccagttatcaacagtaccatttccttaatgtattgaatagacagggcagaggccctctattcaagtacaactttacttataaattttcctatatctttacaccctaaattgaattaaatgtattttgcatatttgcaaagtagataaaattttaattttaatttaaaacatgtcctgcctatctttgtttaacacaatttcaaataccaaggtcaaacaatatataaattattgtatcattaacatgtaatttcacagtacatgctgacatacctgcacacataacttggtacagttacaccaggtgacatacctgcacccagaacttggtacaataacaccaggagacatacctgcacatagaacttaatacagtaacaccgggtgacatacttgcacacagaacttggtacagtaacaccaggtgacatacctgcacacagaacttggtacagttacaccaggtgacatacctgcacacagaacttgatacagttacaccaggtgacatacctgcacacagaacttggtacagtaactccaggtgacaaacctgcacacagaacttggtacagtaacactaggtgacatacctgcacacagaacttggtacagtaacaccaagtgacatacctgcacgcagaacttggtacagttataccaggtgacaaacctgcacacagaacttggtacagtaacaccaggtgacatacctgcacacagaacttggtacagttataccaggtgaaatacctgcacacacaacttggtacagtaacaccaggtgacatacctgcacacagaacttggtacagtatcactaggaaggattttacagctttctccacatttctgcagcagtttaacatgagtgctgtggctgttccacacaacagaacacaatctgtatggtaaccctggaaacagacataaagttttttagcaacaaaattaaacataattaccataccttagtaaaaatctgactctctcttaagctgccgctaacttgtttctttctactatggatttcagctagcatgtacattgcacaaacaaaagtttaaaaatctttagtgttctttaagtaaatagttcaagttattaaatactacacatatatttgagaccagacttatttgaacttgaaaatgttctcataatgagttaagcacccactcaactatctgatcaaactcatcatatcatacagttaagggggaatggtactttgtcaaaatttaagatttgctaatagtcgtatataccaaaataaacttgaagatatttcaaatttgtatcatcatcttttagagcgataaacatgcgtatgacgttaccatgacgtcgcaaacatgacccgttttcgcgctttttacgtccgttaatggtagcactaaaatggtataaaactcgatactacaaacgtattgttggcgtcaatgcattagattatatatcaaacgacagaataaagcaatttcttagtgatcattaacatgaaaaggtattttctatccgaattttcgaaggaggttcgaaaacagacatttggttgtttaagaaaattcagggaaaaaatcgcttctgatccattttgcaaaaaaatggcccgtggaatttttgccaattttttgtatgtaaaaattcattatgttgttaatggctgtgccaaaatagaaaaaagttcaccgaagcgtttttctagtacaaccgtttgaattagagcattgtgacgcagtaaacaacgtcgcttaagacatgacgaaagcacgtgaatatttacattattagccttatttttacaccagtggttgcaaagatggtgctctccatacatatgtggaactatgctttctagcgcctgtattaattcagcttctcctttttcttcaagatttattgaaactcactttgcactggaaaacaagcttgcaatggaaattattttctattgttaattgttcttttaaaaaaaaatattcaggacaattaaaatgtagagtaaaaatatgtttgtacatcagtccagaattgcttgcctctttatgcaactgagcacgaatatcgggctccatagcttttacagaattgctccatttttttggcatctgtgaagttgaccatatttaattgttttcgtgtaaactttgataagttttcacacagttattgttactttcaaacattacatatgttgcaacaatatttgttacttatttataaacttgaacccatataataaaacagttattgactgttaagccatcggatatgatgtgatattcaacggaggaggacaatattgacctcttccagtgaataccatagcatatccaatggctcaagggtcaataataatataattttcaaaacgaaattaacataaataattgacaaaaaactcaataaaaatattgctctttttcactctaacttttagaaaattattaaacttatatagcagtcatagataattatcactcacacgggtgtgttaaatttacatatatattatttttttatgtgtatttattttatgtaataagttgctttgaaacaaacataatattttgatggcaaatttatatttatagatagatttattgataatatttctttagtgctgatatttacgagattatcccatttttgttttcatgcaaaaatatagccaagggagacaaacagatactgattaagtacggctgttatatacattcttattacagaaacacaacctaaattacagatttgtaccagcatcgtgttgacttgtcaggaaattatcagtagcgcggtacggtgacctcggaaaagggcgcataacatgcgagattgtcggcttatatggaaattccaaatgaattcatattattgtttgttttgattgatagaatcctgttttacggccctttcagtatttcagttatgtcaggcaggtagacaagcttactgccgctcaatggctgtttttttattaaaaatataagcattcttaatttattaagacctattatacagccattctattcaaacttattctttctaaaatacgtgtaaaataaaagctcagtacataatccaggatcgggaacggatttagcatctttttgagtgatcgttctctagtgtatactgctagtttctatttggatcaacattgcaaactttaatatattttttattgaattttaggaaagacaatattgtgaaacaagccacgacggcatatggacggacattcatcattctatatcgttatgtcgtcatgtaaacggaaggggcatgtccgtgatggcatgtttaaaattcataatttagtcgtttctattcaggcttttttccccgtcctgtgcaacaaataactaataacagaaatatttaaatgaaatgagccgcgccttgtgaaaaccaacatacggtggctttgcagtctggtcaggatccatgctgttcgctaacggtttcctaaattgcaataggctttaaaagcgaacaacatagatcctgacaagactgcgcaagctggtgtggatcaaagctagtcgcaaagccactttgttggttttttcatggcgcggctcaaataacatatgttaaaacaggtagaacggtatccatttatgtaaatgttttgacgtgtaatctttgcaaacagtacacggcggaatcttaaaattcatacgtaacattcgaattttaaaattccgttgtactgcttgcaaaagaaaaataacgtatatatataaactgtcaacttttaggactgcctacgtggtctgattcactgagatatctcactgatggaggactgtaagttcgagccccgctaccgaacatggctctttatgtgagaacacttggtagtttgtgtcggaagttaggggtttagtactggtcgttcccaggaacaatgtttaaggaaactacccgccatactgttgaaacgagcgtaaaaacttgattcagaaaattaatcaacttttttaacagtcttattaccgtttctataaatctgcctttaattgtatcattaatacaatttaaacgaaattcacattcggatagaactgtgcggaaaaggttctgtaaaatcattctaggagttcgtcctcagacttccaatgctgctgttcttggtgagcttggtcgtttccctctttctgttatatgtaaagagcgatctctaaagtattggttaaatataatgaaaactccccagtcacttgtacacaaaatttttatagaacagtgtgatttgttaaataacaatattgaatctacttgggcttcagctgttaaaagacaactggatatcttaggatatagttatttgtggaataatcagaactatgatattaattatatgccaatgttaaaacaaagattacgtgaccagtatgtacaagactggaatgatgtgataagtaaccagtccaaattgttttattatagaaagtttaaaaaggtgtacaaatttgaaaaatatttagatgtagtaggtaacgatttacatagaaaagaaatgtctcgttttaggctttgttctcataatcttgaaattgaaagtggaagattttctggagttgaaagaaacttacgtgtttgtaaactttgtacacaaaatgtagaatctgaatatcattttctggtatgctgtccaatttatagaaatcttcgtcaaaagtatggtattgttcagtcatttccatgtataaataaatttgcaaggacattatcttcaagtaataataaaaatataagaaatacagccaaatatgtatattatgctatgcaattaagaaaggaaaaacttacagatattgctgcttcttaatgattaatatatatatttagaacctatagttgtttttttactgtatattttgtgatatcttggccatcctttttatttctgtaaatggccaaaggtatattgtatatgccgatatgccaataaatctgaatctgaatctgtattttaattatcccatgcttacctaatgcagctgcaacgtttattaaataggggttccgtaaaatgccgtagcattttagattttacattttaaaatgtagtacactatatagaccatacttagtttcggaaaataggttttttccagtaaagtctttgttttgagtttaacgccattttttcaacagtttttcagtcatataacggcgggctgttaacctaaccagttttcctggattctgtaccagtacaaacctgttctccgcaagtaactgccaacttccccacatgaatcagaggtggaggactaatgatatcagacacagtgtcgttcatcaaatagtcacggagaacataccccccgtccgaggatcgaactagcgaccccgagatccgtagaccaacgctcttacctattgagctaagcg

SEQ ID NO: 4932 - DNA, 10527 bp, Mercenaria mercenaria
  source 1..10527: mol_type = other DNA
accgagtactcgagtcctctacaagatcaaaaacttcgtacgacggtcgtatgagccgccttacgagtttgcttaaattcgactgaatacataccgctcgaagttcgtagcgttcctgtgactgggatataaacagattttgaaggcaaacgctgtattaatctgctaatctcgacaattagcttgtcggcggagatacgcgaaacgaatcgtaagaaattttagaggaacaaactagagaagtaggatttgattttctttcattatttactccaggttaatttgttgcttcccatgctggtcgaaggtgttatcatacagggatggttacagaacgatggaaatttaaagttcatacgtagctttaaagtactgtatggctttaactatgataatatggcctattacaatgacagttctggaccaaaggtaggttaatttgactttaggaagttcgagataagatgataatgcaaacaactcgtctgctttgcgctcgaaaattatagaattgcatcagtaaattaagctttgtctttaagtattgaaagcttccattcgctattgcgttctttatcctatcataagtaataagatggcgttgaatcacgtgtacaaaaatacggggcttttccaggaaaatttgcaactacattgtttgtgacggagtgtcatgcgcaagagccagatccctatgtctaaggtcaaagtcacacgtacaggccaaagatcagatacaagaatgactatgtccagagaattttctttttcatgcatggagggatattgatgttacttggaacaaatgttatcaatcaaggatggatttcatgcgcatgaaccaggtccctagttttagaactactcccctttgttgttatttcagatagcttatgttgtttctttttttattactggacgtaggaaaaaatcgatgccacttttctgtggtacagcatgcatgttacacccaattttaggtttattttaacctgtcgttctcttgtaaggatttttgtgtgaccttgcgtctctttttttgtcactataagtagcttatattgtaacatttttataactgaccgtatagaaaaaccaaaacaagttttctgtggtacaacatagatgcttctttcaaattttaggttattttaagtatctctacctaataaagagtttttcggacttaggaaaaacaagatatttcttgtggacttacttccctaaggtgcaaccataaaaagcttattcttgaaacttttaaacctggttgttagaattggatatgtcactggttgggcttattgtctaccaaacgaatatacagagtatgttttactgtaaaatttacacgacgggcatatattgttacagtctagcactcttgttaatctatattgaaagacgattatatgcactacgtccatgaaagttccttattagtaacaacgatttatacctgttaagacaagaagttttatgccaaaatattgatttgtcaataaaaaaaaaattgttcaagcatatctacttgctgacttactaaatcaagtaaacatgtatatgtttaaccttagttttgatatgaagtatgaattaagtctaacatttgcacgtgaacgttccaggttttctacatatctgacggagcagaatacaattttactgagacgttttggttttcaaaaccttttctggccggaataattggactggagattccaagcgaagaaaactcttgccttaaaacagaatttattgtatgcaaacggaatggtaatctactgaataacgtactcgtatttatgtaaaatatgttttagtagctcggtacactgagttcaagataccatttctttctcatttgtggacttatacaactgtactcctatctaatttagtaaccaaccaacctttaaatacgtcgattcttgatatagtaactttgttatttcacaatgtgtagtaaagatcaacatataccatagataaatgaacaatccgtaactaaacccatgcagtagaaagattccacacgagttcacttcggattttacctgtcaataccaccaaaactaatccattttatcccattaacgtttttgtttcaataacggatgaattctttgctattattagtttaatataagggtatggtcgaattgattcaagaaatcattgtgacgaggtagccaaatactcttgctaaaagtacaattttagattttaaaatcgttaaatgttaacgtctgaaatatgtgtaggccttatcatcttttaaaaaagtctttaagtactgtgttgtggctgaataagtcttcctgtaattagactcacagtttcttttgagataatggagaaaatttaatagcgctgtaatacaatttcacgaaagcaggtgctaggacggcgtgaggggtgttcctcaattcatttcctcttgctattatgttgtttgggtacgttcaatgttttaaacagattttttctcagagtttattgtttgtttaattatttaataagttagaaagcaagccattcatatgacaatctagtcttgatatcatactagcttcctgtgcttacttccgaaggggcatttaagcggaacacatttggcaagtgcattcaatgcttaaccagtttacagatattaacttctactaagcagatgatcggttgtaactaatttcagaaaatgacttttctttcaagatgtttgaaagataaattgcttagttgaaaaagtcttaaaacgtaatatatcattaaaacaagtgcagtattcactagtttgattattcttacactattttatggcctgctcgcttatctcaataggtagagcctagagttacggatcgtggcgttgtaagttcaatatccgggcggggcgtatgttttcctttactcctggcaatttgataaagacattgtgcctgaaatcatttgtcctcctcctctgattcgcaaggagaagttgacagttacttgcagagaacaggtttatactggtacaggatccaataacgccgattaggttaattacccgccgttatataacttaaatactattgaaaaacggcgttaaactcgaaacaaacaaagaaacaaatacttttaatgcaatatactagcatcttgtataatatgtaggttgaaagaggtcagttctatgacttgttaaattctatatttttagtggaacgtaactgtgcaagtacccaagatattgggtggcaaacccttacagaaaggtatataccaagcgaagaatttcaaaagagaggattggcagcttattaccgcacttgtttgcagaagtgtagaaggacatcattttgtaatgcgtttcaatataacactacaagaacagtgtgtagactttttataggccagcctttgcctccatttcattcatttatggaaatgaggaatgtatcattttcgtacaaattatgcgttaagggtaagtttttaattagtacatttctatgttttgtatttttttgtcattcagttgaaataaaatttgcagtagtacagtttaattgatgtcaattgattttatcctgattgtaatattgtctcatgtttgttatgtcaatgtgtaagtagatcagtttgtatatatttaaggatgtaggctcgtttttagctcgattattaaagagtagttagaactgttggactcacacttgcgtcggcaccagtgtctcgaatgagttaagtttgtgtatgtaagctgatatctcaataacaactcgtgggaaatgattgaaacttcacactcttattcacagtaataaactgacttacagtgcttagattcaataactctgttaagctttttttcagaaaattgtgcctcttttcggacttggcagtttttggttaaggttttgtatgtaagctgctatctcagtacccactaacgggaatggattgaaacttcatatacctgtttactttcatgatctaataagctatgtacgggttccataaatctacttagcatttttataaaactatgtccattttactacttagcagatttttatcaagattttatatgtaagctggtatctcaacacccactaaagtaaatggatggaaacttcacatacttgtccactgtcatgagtggatatgccactgtacaagttccatcaccctattttgtaattttataaaactatgccccttttccgatttttatatttattcagttgacaaggctgttttatagtcgagcgttgctgtcctccgacagctcttgtttttgtaccattcttttccatacactgtgagcttgaagaacattagtttctaagacaatcaagagcagaaagacacaggtcaccgaactcttttttgttttgtaggtcattttctagcacttctgaaataatgtaaaattgattgaaaatcgttctttagtttattcaacatataagattcaacttaatgttatacggatttcaggtcttaccggttactatgaatgcaaggtgatatcagaagtatataagcgtaattgtcactaacaaatctataaaattttacatgctgacaaaattacccaacttactttattttcataggaaaaatatatttaaatctatggaaaatgaaaaacaaaatctgcgcttcatattttgaaaatattttgctgttttaatgacacacaaaaatgcttcaaaacggatagaatagtgcaaatgctggcgaaaccatgcatctatattcaagagatttatttagaacagataaaaatatttatgttttagttcttattgttttaactcatacttcctatgttaaaaatgctatgtaaatagttatattctatatgtaggttattattgtatatattaatcagaaaattatcagaaccaaaccctgtctactttagttgatacttatactcaattaatcatcttgcaacaattaaaggcaaatgcgagacaaaataagttattttgattatttagcattaatttttggcacagattttgttagcaaaaacaaaacgctcatacatccttaaggtacagaaactgttatatgaggatatggtatacaatagtaataaacgcctactacgtgcttcatatctattagataacatagttgcatgcgtgcttatattttcttcttaatgattgttcactattgttgattgtactttttatttcagaacttccttttcgtcaaaacatttcatccgagacaattataacgtcaccaaagtacccatattactatggagaccatattgaatacacatggaatgtacgtgtggctgacgcagtcgccctcaatttcgatgttcttgacgtcttttttccaaccgtagatatcagcgtgagtaacataaacacatgcacgttttcatatcaaaaatatgtattgtttatcgtagtattatcggacattggcatattatatgtgtgtgtgtgtgttcgggttaaacatcttttttcccgcctgtttacaaagaacaacaaaagctgtgacaaaaatgttttaagatttgtttaaaacaaaccgtaaatacatagataaaatcagcttcgggttatcaatcataaagctccattttaatcaaaattttagataagaaaatgcgaccatatacttgaaatgtttattttgtgtcatggaaagctgtatgtcctccaacaataaatgtattgcttgatgaattaaaggtgttcaaaaatgggtttttatcggacagaatttccgcatatccagatctggatactaagaccaactggacattgttctgtaagaaaaccagatagttatattgagtaacagaatataaataacatatatttgatctctggttaatatgtgttacaaatccaaataatgacataatcttccgatattatggaatatgaaacataataaacatttttatgcccccgaagggaggcatatagtttttgaaccgtctgtcggtctgtcggtctgtcagtctgtcggtccgtccagaattttcgtgtccggtccatatctttgtcatcgatggatggattttcaaataacttggcatgaatgtgtaccacagtaagacgacgtgcagtgcgcaagacccaggtctgtagctcaaaggtcaaggtcacacttagacgttaaaggatagtgcattgatgggcgtgtccggtccatatctttgtcatcgatggatggattttcaaataacttggcatcaatgtgtaccgcagtaagacgacgtgcagtgcgcaagacccaggttcgtagctcaaaggtaaaggtcacacttagacgttaaaggatagtgcattgaggggcgtgtccggtccatatctttgtcatcgatagatggattttcaaataacttggcatcaatgtgtaccgcagtaagacgacgtgcagtgcgcaagacccaggtccgtagctcaaaggtcaatgtcacacttagacgttaaaggatagtgcattgatgggcgtgtccggtccatatctttgtcatcgatggatggattttcaaataacttggcatgaatgtgtaccacagtaagacgacgtgtcacacgcaagacccaggtccgtagctcaaaggtcaaggtcacacttagacgttaaagatcatttttcatgatagtgcattgatgggcatgtccggtccatatctttgtcattcatgcatggattttaaaacaactatgcatgaatgtgtgacacagtaagacaatgtgtcgcgcgcaagacccagctccgtaggtcaaaggtcctaaactcttaacatcggccataactattcattcaaagtgccatcgggggcatgtgtcatcctacggagacagctcttgtttactatggttacagggcacgttatttgataaatttcgttttaaagttgcaattcttaaattgtaatacggacattggagaatactatctaacaagtcagtaattactattaattgctaattgaacatcggtccctgtttctgttttctcagttatccgacaacagccagatttataggtaaatgattcggacaaactttgatagagatgtgtgttgtttaaactcagtggattgtgtaatgattgtttgatgtaatatagatacatctcaggaggtttgtagcattggatagaccgacttacagaaaaacatttaatttaccttctgtgttgattaacatatattaaactgctttcagaccaattagctcctgttaggtagattatatgattcatgttgaatttaagattgactatactgaaatctatgacattagttataagaaacaatatttcaggaagtctttaacaagattaaatcacattttttgttatcgttactggaattagccaaaaattacacagaggggaagaaggaaaaataaagcttctgttattgaagcctatatatgtgacactttcaataataccgtttgatagaaatatatgttgataaagtagaaatatgtaagttacataccttgatgtgtcattgacaacatccacttttgagattgaagtctgtattaaaaaagaaagaaaatacaaatatgtaagttgcataacatgatctgtcatcataaaaaatcatctttctagagaacaagagtggcgtaaaatatctcgttcatacgtttgaagaaagtttaatgttaaatcttaagtcactatagagtgaaattattagtcccctaccggcggtaaaccgtcattccgagcttacatttgcatattattcttttatgtaattcatttcgtaagagtttacgtggctaacagaacaatagaaagtacaaaagagtagccacataagtacccatataaatatgatcgtccgtcgcaaatatggatcttgcgataactcaaaatgtattgaagccaggttcataaaacacggtatgtgaatagagggtgatatgtagattatgcatttacatgacttatgcttgtaggtcaaaggacaaacatcattaaatcaagtataataatgcttcccctaccgatggaacaccggaggggtctataggaatgtcgtccatacgtccatcccaccggccattcttcagtccgtccgtccgcaaatcttcttcctgcaataacttaaaacgttttcaagctaggttaataaaacttggttgagaatagagagcaagatgtaaattatgcgtgtacatgactaatgtttttaggtcaaaggtcaatgtcaatattggaggtgaattaaattttgttctgctccttaacattcatgtacatcaacggattatcttcgtgctacacacaaacgtccccatgattagacaatctgtcaacgcatgatctatgcttgttggtttaagatcaaggtcactgttcaaagtcaagtaaaaaagaaatctgttttttattacttttaattgcatcaaatgatttcctagttctacacagtcatgatccccttgattagactatgtatcgcgcagatgacccttggttatcggtctaaggtcaatgtcactattgaaggtcgagtaaaattgttattttaccggtaggggacctctgtattgccattgcaatacccgatcggttgttttcttaaaatttattttttgtataacacaaatatctttcaaattcattttcagttttctaaatttacattgtgaatttaaaaagttcattttattttgatcttgtagtactatatggtcaagctcagtattctttccgtatacttgtctgttcatctgttctgtcatcctagtctttaccattaaatacttctattattttgttccctcttaaatttcacagtttcaacttaaatatcccatgcgagattctagaatcgtccagtataattcttgtttggttgccggacatattggaattcttaaaacgctcaaggacaattctagaacggccattttctcatactgcgcagaacataaagacatggtatcgaatatcaaagtcatggcgcgcgcgcgtgcgtgtgcgtgcgtgcgtgcgtgcgtttgttcgggttaaacgttttttttcaacatttttacagtcatataaacgacggtgtctacttgtagcagtgagcacaatgcccaactttatactgctgactcacgccgtagacgtcatgtgacacgaaaccctacctggtcacattatactgacaccgggctgaccagtcctaacactatcctcttaatactgagtgccaaacgaggaagctattagtaccattttttacgtcttttgtatgacgcggccgaggatcaaacacacgacatcccgcgatcgaagcgggcgctctaccactaggctaccgatgcggtctaattcatagcgaggagtgtaataacgattgcttgaaaaacaaaatagatgtgggttacatattaatgtcataccacttggtaacatttatttacctttatttcgatccagctgacaattgtcctgaaatatactaattggcacttttgttgtattgcagaaaagtggattactgtgctacgatagattagactttggtcagaatgaaaagcatgtcaagagagaagaaatagcatcaaagaaggatcagcaatattatcgccagagcagaattatttcagagaaagggaatcagctgttcattcgaattaagtcctgttatgcaaatcaaacgatgcccttcagagggtttgcaatcaaaattacaaaatccggtagagtagtatttctcaatgttgttaatgtcgatttctttatcgcaaacattaacattaataatcctactgcttagtgcagagctcggttattgattttgaaaaataaagttttttttctttaaacagtacttatattaaacagaattgaaactaagtttgtttttttgcgatatcacaaatcacattcatcagtaaaacagacacacctactatacaattattaaaagcgattgtttcataaataaacgttttcatatcgcatttaagaacacgacttcgtcatgatatccattttagagatccatatctgttttattcatagaattttattttagaccaaaaatatacacagatacattttagcaaagatcagttcacataaaaatcttctttttttcagattgtcctgcttgtaaacgaaaacaggactgtacttatacttgcggctacattcaaagtccgtattttccttctggaatgtatcagaaagactcatctacaacatataaaattcgggccaatagtaacgaatacgtgaagatacaaataacctactacgatgtccctgatgaacgtacagccttcctttcggttcgtttgtctagtctttacgcctttttatatgcttttcttctgatatttcacaatgttgcttagttacttaagcgaacaatttcactaataattattttttttctaaactacctcataattttaggtaacgtttttagctggatgagcttttgtgaccgctcagtgtgcgccgtgtgttgtgcgtcgtgcgtctgtcaacactttctaaaaaaatcttcttccttgaaaacca

SEQ ID NO: 4933 - DNA, 10039 bp, Mercenaria mercenaria
  source 1..10039: mol_type = other DNA
aattctctaagatgttaggccagatcatattaaactaaatattccacttggtttttcttttttagaataatcagtaaaattttatatatcaccttccttcgcgggcgaaaaattaaaacttggacaatgaaaataattgacaaaaggaaacatattaacaacaagaaataatttgacaaaaagtcaataaaacaactacaccacacgtgtgtttcaatagacgtgtaagaacagagatatcagcttgttaaaaaccatgaataatgtgtctaaggtatataaataccttacggcgagcttaaaagaggacataaatcatgaaagatcggtgtcagcgttatgggagttatcgttcatgctgttgataataatgagaaactaattaaaatccaaaggataaaaggaattgtgtacatgccccttgaaaatgtttatgaagtctaaaaacgaacaagcccgagctgtctgagaacagcaacgctcgactattcaacagccttgtcaattgaatgaatataaaactcgaaaaagaggcataattttgtaaaaatatataacagggttatggaacctgcacagtgcttatcagctcatgacagtggacaagtgtgtgaagtttcaatccattcccattagtgggtactgagataccaccttacatataagaatttaaccaaaaactgctaagttgaaaaaggggcataattttgtaaaaatgcaaagtagaattattgaactttgcactacaagtcatatcatgacagtgaacaagtgagtaccattgctcaatctgatatgatcaagttttgacatagagcacataggcatacacattaaatatcatcaggacaaacattttcttgtaacagtcccttttgacctagtcagggccaatttccataccaagttgagggtcctaggctcaaatgctgcattttgtactaacatgactattccttaccctggaagacttaaataacatttaaaaccaatatcatcagatgctgctgagatatattcatttacataaaataaagggaggtaatttgtcataaattcagtcaaaagttatctaccctaattgtccgagtccatctgatggcacacatggcatttcaaatcagtatcttcattggttactgagataaacccatattaatttgaaacaaagggaggtaatctgacataaaatcagtccatagctatctaccctggttgcctcagtccagctaaagacaataatgaaattaattaagttctataaatattcatcgagataaatccatttttattaaaatcaggggaggtaatcatgcattggtatatgcatgtagaagatacagagtacaagcctatagaacaatatattagtaaagtattcatatcgataaatgttcaatcaagagttatctaatatgactatttcttaccatggaagacataaataacgtttcaaagcaatctcattagaagccgctaaggcgtattcatttagataaaaataaaggggggtaatttgtcataacttcagtcaatatgtatcttcactgattgtccaagtccatctgttgacataaatgaaatttcagatcagtatcttcattagttacggagatatacccattttaatttgaaataaagggaggtaatttggcataaaatcactccatagttatctaccctgattgtctcaggccaactaatgacaataatgaaatttcaaataagtcctataagtacttcctgatattaatccattttgattacaatcaggggaggtaatcagatatgaaataactctggagcctacgattggatctgacagattcgtcatggaatccaagatttaatgttgttgttgaagatattttggaagtttgtatcaaatcaaactataaatgaagtctctgtatggctgcaagagccaaaatagcaaattttttacctttaaggggccataactctagaacccatgatggaatctggccagttcaagaaaagaaccaatattttgtggttatacaagttgtgtgcaagtttggttaaaatcaaatcataaatgaagctgctattgtgcagacaaggtcaaaatagctgatttggacccaggggccataactctggaacccattatgggatctggccggttcaagaaaggaatcgagatcgtatggtgacacacgttttgtgcaagtttgattaaattcaaatcataaatgaagctgctattgtgcagacaaggtcaaaatagctaattttggccctttcaggggccataactctggaacccataatggaatttggccagttcaagaaaagtaccaagaacttatggtgagacaagttgtgtgcaagtttggtaaaaatcaaatcataaatgaaacctctatcgtgcagacaagaaattgttatcggacggacggacgcacgcacggacggacggactgacgacggacgacggatgaagggtgatcacaaaagctcaccttgtcactatgtgacaggtgagctaaaaatgcaaagtagagttatgggacctgcacagtgcatgtcagatcatgacagtgaataagtgtgtgaagtttcaatccattcccaacagtggatactgagaaaccagcttacatacaaaaacttaaccaaaatctgctaagtggaaaaaggggcataattttgaaaaaagcaaggaagagttatgggacctgcttagtgcatgtcagatcatgacagtgaacaagtgtgtgaagtcttaatccgtactgagataccagcttacatacaaaaccttaaccaaatcgggacgccgacgcagacgccaacgcggacgccgacgcacgggcgaatccaatagctctactactctttgaatagtcgagctaaaaaaataatcataaattataatcctgaccatattgcacataaccacttaaccaaaaatttctaagtcgaaaaagaggcataattttgtaaaaaagcaaaatagagttatggaacctgtgccatgtaagtcagtttatcacagtgaataagtatgtgaagtttcaatccattcccgcaagcggttactgagataccagcttacatacaaaaacttaaccaaatcgggacgccgacgcagacgccaacgcggacgccgacgcacgggcgaatcaaatagctctactattctttgaatagtcgagctaaaaaaataatcataaattataatcctgaccatattgcacataaccacttcatgttgatgatgtataccaagtttcatttggattgatacacatgctacagatactattgtattacatatattgtgaaatctaaactgaaggaacataactaacacataacaatcgcacatacaagtccagactataaattatgcgcatttgtatttaatttggatggaataattaggaagtttttggatgcacagttacaaatgctgtaatactgtaaaatttttaaaaaaagtggaatgactcaaaaagtaaaacggatattaaaatccgaacaataaacgcgcatgcccacttcatgtttatgacgtataccaagtttcatttgatctggatggaacgtgtagtagttgaatgtaaaatgtatgtatgtagctgttaaataaaaaaagggataactcaagaaaaaatatcagaacatgaaagttccgacaatgtgcgcgtgccttcttcatgttgatgatgtttaccgggcttcatttgatttagtacacaaggtagagacgtagttgttgtattgtttagtgcaagaagtttcatttgaagttgaaggaaactgcaggagaagttgaaaacacaagaaagtgtgacggttggatagaatgactgacgaacagttcaaaacgctacatgccttccgggtcttcggcacttggggcatgaaatatcaagtaaaaagagggaccagggccttatgtcatatgatgtgaatggtgatcaggaacaagtattttaggttttagtaacaacaataaaagctgtctgttgacagcgcgctcgactatttgaagaattgatggaagtatggggtcaaaatataggcagagattttcggacaaaagaagaaaaaatagataagacaaacaatgtacctgtatttgtggatttggataagtcttgcactatttggctatatgtgaccatgatggtaagcaagtgttcaaagtttcaaagccatgtattatgtcaaacagtttagacaaaatatggaatggtatgcaaaacttaactaactttatgtcaaaaaagggccataattcagccaaaatatttgacagagttatgaagtcttgcctacaggtagagactaatataataaacgagtgttcaaagtttcaaagccatgcgtcaaatagtttttacaaaacatggacttgtacgaaatctgaatcaatttctaagttcaaaaagggccataatacagtcaaaatatttgacagagttacgtactcttgcctacaggtagaaactgttataataaatcagagttccgaatttgaagtaaatatcattgacggtatacaaaatattaccatttcataacaagagctgtccgtaaggcagcgcgctccactattcggcgatttgacagtaaaataaatttatgtctcaattagagacctctactttaaaaggaagatacaccaaaatataaaaacaccctactactcagaggggttaaaggtcaagtatggaaggggtactgacattctttattttgatggaattaaattatatcagaaaaaaacagtcaaagaaactacatgcacataaagtataaggactttgcttaactcaaattatattactatttatttcctatttctatttttttttattttattttattttatttatttattttacttgttattataacagatgatgatgatatagatacattttaagtttcacgtcattatcttacattgtactgaagttatatccagaaagcgaagattgccaaaaaactttaagtatgaaagtggcataattctgtcaaaaatacattagagtaatggggattgtagatgatgattataaagaaacatttttaatttcaagtcattatcttttaaattaccaaagatatgtctacaaacgaagctttcaacaaaattgaacatgaaaataattccaagtataacaacttggtgaccttgaccttggatataatgggtccagccccttaacatactctgtttgtatgctggacaatgtttatgtgaagttacagtaagatataagcaatagtaacaaagatatgacagtaaaacaaaggttgccgaaaaactttaaccttaaaaataacctaaatataacaccttggtgaccttgaccttgggtataatgagcccagcccctgcacatattttgtttgtatgctggacaatgtttatgtgaagttacagtaagatataagcaatagtaacaaagatatgacagaaaaaaaaggttgccgaaaaactttaaccaagaaagggcacgccgacgccggggcgagtagtatagcacccctgttctccgaatagtggagctaaaaactttaaccaacgccgacgccgacgccgggatgagtagtatagctctccatattcttcaaatagtcgagctaaaaataaaaactttagccaagaatctatgatggccgcagatgcggacgccgacacaatggtgagtaggatagctctctacataattagtggtgcttaaaacaaactattgcaatataaatggaacaaaatcattaaaatttgacgaaacaaagggccataactcctctgaaaaatcattgaactggaacatgacgataatatgcacaataagacttggcactgattactcctgtaccttttggtggaaatctgcctaataatataagaggtggccaaaacatcacaaaaattgataaataaagggtcgtaactccacttgaaatcagctgacgatatgcacaactaggattagcaataaacacttttatgaagtttggtgtaaatccatccagtagtgtcgacagctttgtgacagacatactgacagacatacaaacagacagatggacagcactcaatcaaaatatcaactcttacagttaaagtcaatgtcatatacaaaatttaaacggtcttacctggcatgcatcgaaatgtcagctatcggaaacaacatatatgtgtaagacgtgcggcacggcgatatcgagtctttttctacgtctttcaattatgtcaaactctgtcttcttgcctgaaataaatcaaaatttaaagacctgatgctacaataacaaaataaatccacgaaattcaatgcaattgtgcttagtattgcttaatgatcgaggcaatcgattatcagacatgtctttttatagtaattctccagatgactcttggttttaatacatgttgtaaaggtcgttgacttcaaattatttacacatccctgctgtgagtttgagtctcgctcgatgtcgtttaattctctcacttcaaggttgtccttaaggctcgttgccaatattttgatttattaaataataaattgttgttaatgttacaaggcatataagaacatgacttgagcaataatcagggcatttaatgtttataacattgttaaggcctaaaaaaaaattctttgtttccggtaacatgctcaaaaaaattagggtaggtaggtcggaaatttttttttttttggaatttttttttattaagggagacttttcgaaaattattttttggtcaaaaaatgattacaaataagggggttatacctttagagcatcagtaagttgatttctaacatcactggccatgtttgaagcataaaaagtgcagttttgcatcattttgttaaaaagttgaaaaaaatattctccaaggccataaaaacatttagggtcgggccaaaaatttagggtaggtcgggataccggaaacaaacaatttttttttttacgcctactacatattgaaatgcttactttggaatggcagtatttgactagtattcacaggttaggaattctgaccaatcagagagctgcatttgcaagtactgtaatttgaatcagcgactccgaacgggatatactattatagccacgtttgccagtctggatattaagcacattgtacagcaatataatttaaataatgcatactttctaaaagcattgtttaccgcaaaaccaggttctatctatttatcttccatcacggggaagcagacaattatggaattttattttgacacttgcatacaaagcaggtaaaatgtatttcaaactaacagaacaaacgttataaagtaatatttctctttacctgaatgaagcgttcgtctgtccggccatcaaggattttctgttatgagcacgaggtgtggaaaagctctctaccatcagctatacagggcaaatgcagacgatatgcccatcgaacaatgctgaaaatttatttgatatttttctatattgacgtagatgtgtatgttataaaaaaagattattagacttacatcagaaatatccactcgttcattcgcggtaaaatattgtgctcctaatgtcgcgcaatattttcgatgcagaactcgtgcatatttctcaatacaaatctacttacatccaaaccctacattaataagttttattgcactataagactgatagtctatgacactaaattatttttaagtcaattcatttctgaagcagacgagagttgctaagtgatgcactctaagacagagcatactcttcagtttagggttgattctctttatatccggaacaaacgccttacaaatttgcatcgcttttggggtcagtatgttatacaagccagtatcagcgtacataatgacgactttcaaattcaaaaatgttatcaaagttttatattggaaggtaactctaggtattacttccatcactggtgtcgtctgttagaagcaacggatgctgtcagctggatataattggcaacttattgtcatgttataaatcctcttaaataagaacctatcagttttacaccagcaaatctctcattttgttcaggaaaaataaagaaagttacgtcacagaactagatgtgagcttatatcaacaatagctttcggtgtgcctgccacattttatattgttttacaacatgcacacggctaagccaggaacagtaagtgttatacaaattctggctcgaactcgcgccgcctaaatggcaattcttaaataatttagtagcctaccttgttgaaaacagttaattactatgacacaatgggtccagcacatctctggtgaccggcatcgacactgcgccagcgcgtctctggcgaccggaatcaatagggtacctgtgcacctctggttatcgacatctttatggtaccagcaaggtagtacttctttcagcaacggtagttccaccaactaaaattttcttcctgctaatacaataaaataaataaccacattgttttccctgggtttctcgccagtacttactttcatcagtcatgtatagacttcagtatttcaactttatttaaaaatttaaagacacttataaccctgtttacttttaactgacagtaaataaaatttcgtattaaaattttacggtttgaaaaaatggtctcaaattcaaacaccgatgatcgcggattcgacccacgtttcaggctgatatggtagcaaacgcttgcctaatatacaccatagcactgcagtgagccaaataaaactttcttgacgtaaaattacaccagtcaggagaacctttaactaaattaccgacttatattcaaagtgcgttatacattataagtaaatccttacgtgtattgtccaagaactgcttctcgttggatagttcgggttcttcgtccggtacttggggttttactttcaccaaagccagaaactgtatgcgcattctgaagctctagaactatatatagaattgacattttcttctaaagatttgaagttctgcactgctgactgagtgctggtagtagcaattaacactaatgcgtataaaataaggacaaagaattaaaacaatgtcagccttcacgataatccgaaaattctactttgtagaatagctattaaaatgaaaatgaatgtgcataacttggttgaaaactgtacgccaaatataaagctagcaaaagaaataaactacttgtaaagacaacgtacatacctcatttgcccgcgagaaaaaaggaccaagctgcaccgccactaaaccattgtgcattctacaacacgacatccttgcacgtgtttgtgtggtcaacatcagccaccataactgcaccgttcactaaaccattgtgaaatctacaacatgatatctgcacatatgtttgtagtcaacatcagccaccattttggaaacaatctgcagagaaatgcatacaaaatagtataatataagtaacaatatacacacctaccgttttatgatgaagagaaacgcatattttgtttgacctgcatctccatatccgtctgcgtctttattctccaagtaccaccccaacattctattagaaaagaaaaacagaaatacaaaacataaaagaaatgaaaagcagaaataaaatagaacaattgcgagcgttttcctaggtgtcgcctgtaccttatgtctctcctctgcatatttcattgtatgtctttgtatctatctaaaattaataggaaaagtaaaattatttttaaaaaacagcgcaatatttaacttctaaaaatgtgtacataataatctattgctatttatgacagacggaaaacagaaatacaccttgtaacagaacgaaagacaaagatcccgatgcaacaaacaatttgcaccaacaaaagccccttttagccaaacaacacaaaccatatcataaacaaccgagaaaaaacacactgaagacaccaaaccaccaccacaaacactgaaacaccgccactgacaccaccagaaacacgcaagcaccaccacaaa

SEQ ID NO: 4934 - DNA, 10024 bp, Mercenaria mercenaria
  source 1..10024: mol_type = other DNA
ttgaaagaacctaacatgccccatgcacaactactgttgttactgatcacttgtgtgaagtttcattaaattgtgtcaaggggatgagtagagatggtgcgcacaagattgtgtccatgtatatagtatagtaacaaaaaacaaagtcctgtaactctgcaatttttttttctgaaagaacctaacatgtcccatgcacaactactgttgttactgatcacttgtgtgaagtttcattaaattgtgtcaaggggatgaggagagatggagcgcacaagattgtgtctatgaatatagtattgtaacaaaaaacaaagtccggtaactctgcaaattttttttctgaaagaacctaacatgtcccatgcacaactactgttgttactgatcacttgtgtgaagtttcattaaattgtgtcaaggggatgagaagagattgtgcgcacaagattgtgtctatgtcgcacaagattgtgtctatgtatatagtatagtaacaaaaaacaaagtgccgtaactctgcaatttttttttctaaaagaacctaacatgccccatacacaactactgttgttactgatcacttgtgtgaagcttcattaaattgtgtcaaggggatgaggagagatggtgcgcacaagattgtgtctacagacagacagacggacagacagacagacggacagacagacagcctgaaaccagtatacccccccttacaactttgttgtcggggggtacaagaaacaagaaagtaggtcactatgtcaaagtcacagtcatataacaagtgacccccagggtggggcctctttttagtcccctactggttgaaaaccagtttcggggactataggaatgcgcttttccgtcattccgtctgtccgtccgcaatttcgagtccggtccataattctgtcatccatgaagggattttaatattacttggcacaaatgttccccatgatgagacgacgtgtcatgcgcaaaacccggacccctagctcaaaggtcaaggtcacaatttgaggtcaaaggtcaacagggcttttttcctgtccggtccataactctcccatccatgaagggattttaatattacttggcataaatgttccccatgatgagacgacgtgtcatgcgcaaaacccggacccctagctcaaaggtcaaggtcacagttggaggtcaaaggtcaacagggcttttttcctgtccggtccataactctcccatccatgaagagattttaatattacttggcacaaatgttccccatgagaagacgacgtgtcatgcgcaaaacctagacacctagcttaaaggtcaaggtcacaatttgaggtctaaggtcaacaaggctattttcctgtccggtccataactctcccatctatgaagggattttaatattacttggcacaaatgtacctcataataagacgacgtgtcatgcacaactttcaaacccctagctcaaaggtcaaggtcacacttagcagtcaaatgttaacatagcatgaacagggtctgtttcgtgtccggtccataactctgacattcattaaggaattttaatatcacttagcacaagtgttccccatgatgagatgacgtgtcgtgcgcaaatcccagacccctagctcaaaggtcaaggtcacaattggggtcaaaggtcaataaggttttttccctgtccgatccagaactctgtcatccatcaagggattacaatattacttggcataaatgtttcccatgatgagacgacgtgtcatgcgcaacacccagtaccctagcttaaaggtcaaggtcacactgagatcaaaggtcaagaggatttttttcctgtccggtctataactttgtcatgcatagcaggatttagatatcagttggcacaaatattcccctggatgagacaacatgtcatgtgcaagaaccaggtccctaggtctaaggtcaaggtcatatttagaggtcaaaggtcaaattcaagaatgactttgtacggaacatttcttcttcatgcatggagggattttgatgtaacttggaccaaatgttcaccaccatgaggcacccatgtttttagaattacgtccctttgttgttactataaatagattttactgtaacttttttattactggcggtagagaaaaatcgagaccacttttctgtggtacagcatgcatgttacatcaaatttttaggtgtattttgacctatctctacctggtaaagagtttcttgtggactcatattatatagatttttttttttttttttttttttttttttttttaaagattaatttccctttgtggttactataaataacttacatgataacatttttataatcagccaaaaaaattcaatatgaaaacaactataggtttttatatatataaattttaatccaagtgttttgttatagcatattgtatatatagtacaatattgtttatacaacattgacagatatcagttcattatgttatactgcagtagagaaaattaggtgccttcctgtaggggactttgtattgcatggcaatacttcattcacttgttaccccaggggcataatttgaacaattctgttagaggtccactaggcaatgctacataccaaatatcaaaagcctaggccttgcagtttcagacaagaagattttttaagtttgctcctatataagtctatgtaaaacttgggacccccggggcggggcctcttttaatcccaggggcacaatttgaacaatcttcatagaggaccacaaggcaatgctacatacaaaatatcaaaggccggcctaggtcttgtagtttcagacaagaagatttttaaaaaaatttcctatgtaagtctatgtaaaacttgggaccccccgggcgaggcctcttttcatcccaggtgcacaatttatataatcttcatagaggaccattagatgatatcacatgccaaatatcaaggcttgcagttttggacaagaagatttttaaagtttttccttttggttgccatggcaaccagagttctgcatggaatgaaattctttgaacaattttgaaaggggagcatccaaggatcattcctgtgaagtttggtgtaattctacccagtggttttcaagaagaagattttttaagaaaattttgacggacggacgactgacactgcacgacggacgacagacattgaccggtcacaaaagctcaccatgagcctgtggctcaggtgagctaaaaaaactagagattgctttcacaaaaaacataattatgtctcccctacatttagcacgcagaaattacataaaaccataaatgaagggccataactccagggaaagtcactgaaccataacattccacagattaggcttggcagcggtaactcctgtggagtttggtggaattccaaccagtggtataggtaacacaaatcaaagaattaaacaaatcaagtgtcataactccagtcaaaattgcttaatcagaacatggtgatactgtaaacctagaaacggtttcgcactatttaagttagcaactttcccagttgatgtgtatcagcgaagtttggtagccgtgaaccagccagctatcatgaaaacgcaaagtttgtagttttcattgtacatgacaacaatgctgtgttttgccgttcattttctaagatggtaatataaatctgcttgacagcttgttttattaattgagatgtttcataatgtagacatttcttattgtagtatatttatattatatacttatatcaaggatcaagtaatttaagcataaatgtggtacaaacaaatacttcgtctatgggacaatatgcaaatatcttgttttaacgaaaataggtaattatgtgaaacactgacaatagtaaaatatttgtttgagcatgttattttaatcaccttggttatgttacagtatcaaacaataaattttattgttaaaacactgttaccttgctcagccatggtccagttatcacaggcaataatgcttttgtttgtttgatcaaaattgatcacaaaaacatctgtatagacatatttagtggtctgctttcttgtactactatgcagtgaattgtgattacaaacggtatattgtggaaagtgaatttcactcacgatcacaaaatagggtagagtaaaaactgtgttaaggataagtgaccaatttctagtatgttcccaattaatgtgcagccttaccagtaattttagctgcgaccctttgttatgtgcttaagctattaagtttcggcgtatttcgcggccagcgtattccgcaaatctttgcagccgctaaatcgtctgtcataaaaacgcgaaatataggtttaaggtaataagcacaactgcccttcacactaatcactcatgagatttggtgaaattaagcctaattgtataatacagcaagtagtgtagacactggaaaaaatatgacaaatcaagggcaataactctgctgaaaatcactgaaccagaacatgccaatgatatgtataactaggcttggcacttgtaacttatatcataaaatttgttaaataaagggccatacccgcaccccccccctccccacccaaaaaaatgcctacaatacactgatcacacctataaggtttggtggaagtctgccctatcatataagagaagtggcaaaaacatcatttaacttgatgaatcaagagccataactcggctgaaaatcatcgaaccagtaaatgccaaaaatatgcacaatgaggctttgcactgatcacttctgtaaggtttggtagaaatccaccaaataatattaaagaagtggctaaaacacagtaaaatttgacaaatcaagggtcataactccactgaaaatcaccgaacaagaaaatgttgatgacatgcaacacaaagcttggcaatgatcactcttgtgatgtttggtgttaattcatcctatgatgtcacaagagttgcataggcaaactttgtgacaaacagaccaactgacggacatcactaaatcaatatgtctccccaactacatatgggactacacaactacataatactgtataattcaaggactaagcacagacaaaaaaaaatgctatatggagttagttctggttcagtacttcaaacatttttggtttggcttcaaagtctgtaaacatgcttattaacctcaatgttgaatagcatttgttacagttataaaaatttagtatggatggcagagttgtaactgaaagtgtcactatgatcttggacctacgggcctaagtcttgcatatggcacattgccttgttttgaggtaagtttatgcccactgacatgaatacctttttcatggattagtgtcataaaacagatcctgtaaacctttgacctccaaggatgaccttgaccttacttgtttgtatctagagcatgacaaattgtcttgttatctggaacattctgctatgaaatatcgaaatccctaaacagaagcagagttattgactttgaacttgaagctacagggcagacctttgagagcatttgtgcagtgatcttgaaatccctgtatggatttctattatgattcagacatgaaccaagtcctgtaaaacctttgacctccaagtttgatcttaacctttgagctgacctgaatcttgcatcaacatatcttgttattgagaacactagtgacatgttaatatcagatctcttgatgaatagataagttaaggttaagacatggaacagacctttgacttttaacagtgctaacctccaagtgtgaccttgaccttggagctacagtcctgggtctatcacaacaaattgtattatagtgtacatttgtgcccggtgacacattattttgttacgaagaacatttgtgccaagttatatgaatatccttaaatacaagactggacaatgtgacggacacacagatgaatgcagcccatttctatttccctattctttgaagaaaaagcaagaagaaatatcttagttaacataatgacaagagctgtccgtaagacagcacgctccactattcagcgatttgacagtaaaatgaatttatgtctcaataagagacctctactttaaaaggaagatacaccaagatataaaaagaccctactactcagaggggttaaaggtcaagtatggaagggttactgaatactaaagttatattctgaaagcgaagattgtcaaaaaactttaagtatgaaaggggcataattctgtcaaaaatacaattagagttatggggattgtaaccatacaagcagatgatgattataaagagatttttttaatttcaagtcattagtttttaaagtaccaaagatatgtctataaacgaagctttcgaaaaaatttaacatgaaaataattccaagtaaaacaacttgatgtccttgaccttgggtataatgggcccagcccctgtacatacattgattgtatgctggacaatgtttatgtgaacttacagtgagatataagcaataataacacagatatgacagaaaaacaaaggttgccgaaaaacgttaaccttaaaaataacctaagtataacaccttggtgaccttgaccttgggtataatgggcccagcccctgcacatactttgtttgcatgctgaacaatgttaatgtgaagttacagtatgatataagaaatagtaacaaagaaaaacaaaggttgctgaaaaactttaaccaagaaagctcatgccgacgcagaatagtggagttaacaagagctgtcacaggagacagtgcgctcgactatttcgatgctggatagtggaactgggcacatctgaggaaactggagctgtcactgaagtgtttaattaccccaattgtggatgaagatattgcacaatagcccgagtctgtgtcaaaaatattaagtaataagagaggtaaagataaagcgtatcaaaacactgtacaagtatgattctatataagtatattctaagcagaaagggggcataattcattaaatattggtgcaagagttacgcatcttgtgtcatatgatgggggtgaggatgtggaacaactacttcaagtttgaatcaaatgcatttcattataactgagataaaaattatagtttactgaaaatgcatcaaaataaaccttaaattaaaagtaaaagggggcataattcataaaaaattggtgccagagttatgcatcttgtgccatatgatgtgggtgatgatgttgaacaattattttaagtctgaatcagtaataacaagagatagagtgaaagtacatcaaaacttttacctgaaattctaaataaaaggggaaataattcatgaaaaactggtgtcagagttatgcaccttgtgtcgaatggtgtggttgatgatgttgaacaacaatttcaagtttgaatcaatccattcagtaataacagagacagagtgtaagtgcataaaaactttaacctgaaattctaagtaaaaagggggaataattcatgaaaaattggtgccagagttatgcaccttgtgtcatatgatgtgggtgatgatgttgaacaattactttaagtctgaatcaaatccactcagtaataacggagacaaggtgaaagtgcataaaaactttaacctggaattcttagtaaaaaggggaataattcatgaaaaattgtgccagagttatgcaccttgtgtcatatgatgtggatgatgatgttgaacaaatattttaagtttgaaccaaatccgttcagtaataacagaggtagaatgaaagtgcatcaaaactataacctgaaattctaagtaaaaagggggaataattcataaaaaattggtgacagaattatgcaccttgtgtcatatgatgtgggtgatgatgttgaacaactatttaaagtttaaatcaaatccatcaagtaataacagagatagagtgaaagtgcatcaaaactataacctgaaaatctaagtgaaaaggggagataaatcaagaaatattggtgccagagttatggcccttatgtcagatgatgtgggtgatgatgaggaataactatttcaagtttgaatcaaatccattgggtaattacagagataagttgaaaaaagagaaagtgtaaaaaaactttaactaaggtggggatgtggaaagacgccgtcgccgggtcgagtaggatagctctccttatactttgtatagtcgagctaaaaaggggcaaagatagaaaacagggacaacccttgtacacaaattcataactaggtttagcttcaatttattttattttttcacttattaaaaacactgttctaacactggtattctttttccattttcccttcttgagagaattggaactgaaggagaacagcttcctccacataaattttcacagtatgctttagcagtggatcacatattcacaaaatctatatacattatcacatctctcctacgattttaaagttctgattttcttcatctctctgtacaggacagtttgatccactgaaaagaaaccgtagatattactaatagtgttacgaacaattttcttttatcctgtgtcattaatgcaatacaatattaaaaaaagagggctaaaatgtccttaaattgttcacctgaccttaactttgagtatactttaccacatgctgtatcatgaatgggataaatgggttagcttaaaatatgataaattatgttctatacatgaaacttgagagctatgggaaagcaaaacaaataaacatttaaaatctgaaaaataatattctgaataaccttctgtcctgtggagatgatgaaatataaacctgtaaatcccacatcggagtgtacaatcaagccaaaatttaatcaaatttgactggagtcaagttactttggataacacatcttggtgttagttataatctgtggaatttttctttccattgtttgtattgttctaaatcttttaaaacacgaaactgcttatccaatcattttttatggtatgcaaatttgtaaaaattatcagtgtttaacaggattattgcaaatgtgtaacaaacataaacatgacagtgtattgtaattttaacaatatggtggatctaaaaccaaacaacaatactgaaaagatatctttttcttccttagtccagctgccacaaggaacaagatttttattttagcgggaggcaattcatattttggcagctgaagtgatatgcaccaatttatggcactgttaatgcacaccccccccctccccccacacacaccccaaaaaatgccaacatttggcaccacatgtggattaggaggagatgcagtgacaatattttttgacttacagactgaaatctctatgaagactttatgtacaacaagagctgtccgtaagacagccaagctcgactatttgaaatattgacccagaagcaggaaaatattacccaaaaaaggtaaacatcaaaagagttttaagttcaaaagtgggaataatttgaccaaaatgcatatcagttatgggacttgctgctatcaactagttttataaccccgaaggcacatgagaagtttcaattcaatatctgcattagttttggagatagaaacttgcatgtaaaactttaacgagaattttcaaagtccaaaagggggcataatttgcccaaaatacatgccagagttatgggacttgatccagtgaggttagtaattgatctagaaaaagaaaaaataagtttcaaatctatatgcctttcagtaatagctgtatgtacttgcacgcaaaacttaaacaagaatttgctaagtccaaaagggggcataatttggccaaaatgaaagtcagagttatgggacttgatcctatcaactagttttataaccccgaagacacatgtgaagtttcaaatcaatatctgcattagttttggagataataacttgcatgtaaaactttaaccaaaattt

SEQ ID NO: 4935 - DNA, 10036 bp, Mercenaria mercenaria
  source 1..10036: mol_type = other DNA
taaatctcttaaaattgttcggtttagtctcattatcctacttttccgccttcccacacataaccccctctctctcccaccgcccccaccctcccccacttcaaaaatgtgaatatttatattttctattaattgtcttggtgctgtgtgtttgtgtcttagatttctgtgtcgttattcgccctgttccccacccatacccaacccccacaaacatacaacactatgaccaaatcgtatttagttagaagaaacctcagaatacttctgtcctaaaacactggccctattacaaaataatttcacaaatatttttcttgcgtgactgttcaagcaaggtgtggaactcaggtgagcgatctagggccaacaaggccctcttgttgctatacgtaacaacacttatcattaagataattatttgtattacataaacctgttaatttttcttccctccaaaaagtaaatgtacacaaggaattgataatcatagtgtcagataggaagtgcgacatttagcgttggtgttgcgacatataacggtgggcgaatttttgcgacatttaacgttaaaggtgcgacatttagcgacagacgactttgcgacatttagcggtggttgcgacatttaacgtcaaccttgcgacatttaacggtggttgcgacatttagcggcgttgcgacatttaacgttgccacagtcatgatggccacagagaattcaaatttgctttacacaatgaaagaaaacagagttggcataatttaggcccctgagatccgtaaataatgacatattgtgatagttctacaaattaagggaaacaactcaatgaaagggcttttaatgttttactatctctagttgcttcgcgtagtgtagtcctagtcataccaacaaaagcgaggtggggaatcaattcaagcggacatagcttttatcttgctccgtggctctattagcttcggtatacacctctttttcactggtatactgctgtcaaaaatctttgactacatcaataaccctactcatgaaaatctagataatgtacttttctttactatctggactccgtttcaggtttataactgactttatatggtttcactgtcttttttgaggttaatgaaatagtttaaataaataaaacaaatacaatgagcgtgaaagtgtgatggcaaatataaactgcatggaattgaattgattctttttttctgtgtagcgttccttcgaaagtacattttgtataacagtaatcaaactaattgtgtcagctgatgcaacggcagtaagtgtatatcaataagataacgaagttaaaacaactgactagaaccatagaaccatctataattatgtatatagggaatatgatagaaccatctataattttcaaaacaaactttattcatcaacgatatgcacagctcatacagtaactaagtgtgtgcatttattatgctggaatggacaacaacgtatctcaatggtaatactacacgttaagggatatgtattcacattcaggccgtatacgtgacggctgtacctccagtggaataagatatttgtatccggggaacaaaaaactactcattgcttagcctttcctttaaatattgttaaaaaatgagatactttattaaatatgttactaaactcaccggatatttcgttttacattttaataaaaaaaagtcaaataggaccccttttaaaagttgcagcaccgtagcactgcaaacgacaatgcatgctctttgtctgacttaatattgcgaacgaaggaaaccgatagtctttagactgcatcaaacagtccgctagcaacgtctatggacagttgtcagaataagacccccaagaacattgtattacataagtagtactaaacagctgtgagtacgaaaatgcaaaataacaaaattgttcgtcagatctacacaaaaacgttcatacacaatttttaattattttcgttaattactggttctgttaaatcttccccagggttaaccccatgatggagaacaccctctttgcccatgcccacgccatcctctctgtcgtgaaggacgtgatgtgatcgccattacttccaagaacgataactcctccaaatccatgaaccctcttagccatgttggctaaagctttgtctgccgcttcctgagctgatacacctgcagataggttatataaaaactgaataagaaatgctttaaacttcagctgatgttcatcaatgtacgtttcgaagggcgaaaacaaaagatgtccaaacgcttcttttaacactttcatatctcagtatgcacctaagcattaacagggaaaagtcattttatagtaaatttgtcaagtacgaaagaataaaacaatagtgcatatttataggcaatatatcggctagtgtaactgataactgggcatggaaataatgcaagctgaatttacaaggcaactccgtcctgaaacgtgtgaaaataagatatgatgataatttctgtgacggaaacatttcacacgcggacttaaaggtaggaaatttaattttagatggactaacccattttcatttgtgtgataatctggtatgctaaaacaaccttgaagatggactcgccatgccctgtacaagatacagcgccgacctcattgtctgcataaccaccggcacctataatgaaaagaataacggttaaaatgtaacggtaccagtttacgatatagtacaatgattattttctaatgttagccaaatgccagcaatcccgtcaacaggatactagttgttctcagaacgtttggcacctaccaagtattccctaccgcaaacttctattcattcaacaaaacgacagaaatataaaatggttatctgtcccatgataacaaaagaacaaaaaggagtttttttttaaaacatcaatgatccatacacgtcagcgttccgaacaaaactgtggcttaaggtaattcataacaaagtaaccgatttagtttgggaacagcaattaacctattaaatatgacaaccattgacaaagtcgttctcgaattaccgatcacaaatcaattgttttagcaaacaggtattagttggacatgactctgtcacattcattttgaatattgacaatagataagattatcatccggtcaagtttgataggcatatatataactgtgtctgccgaccatatattgattaatcgtccacagcatcgacaacattatgaaaactagaagaggtagattcctgattaaatttctctagttaatggcgttcgcggtcaatctccagatcagtataacattaacaaaataacccggcacacatggtaccacatacggccatatactgaccacttgtttgtgttcagaccccgtgttttgttcacaggagataactcatgaggctactcaaatttcgtataattatgtcccttttcttctcaaaaccctgtagataatcagagccaagactgatgaagtcagaatatttaacagaataattgtttctaaaataaataagatgatctagtcggtagccagactaactgaccacatgcaaacaaccaagaataactcagctgtacagaaattggtcggaaaccgtttccagacacaacttgaggactatagatttatctgaggtcacctgctgaggtcataacggtcagcctaaggcatatttttacttagctaatggaatgctgacggacgtatggagtgatcaggatgggcaaagcactttaccaacttcttggaagtctatattttgaaactggctgataaaaatatacgagtattaacaggtaattactctttgttgaaacaagaaattgtgggatcacaagtagcgaggtaataagctaagagaaatggatatttatgaccacttaccaatgatagggctatctcctacacgaccaggcttcttgcatgagattccgccggttgaagttccaaacgctatatttccttgactgtcgattgcaaccgccccaacagtgtcgtgccctgttcctctgtaaaaacgatatatctacatgattctcaaagttctcaaaaaatgctttgactgatcacatatcgggggggggggggggggggggggggggggacttaggtgtattacaggcgatgtaccaggcatgtccagcaacagcacaagatttattgagctaaagggcattatagaaaaagaactccatacatacatacatacatacatacacccaacattaaattggaagaaacattgcaggatgaaaagaatgataaatcatttgaacagtttatgatcaggatatgtcaacaggtcattgtttttaccggtttctaccaaactaaccgaacacttgccccgtaattctataagccaaacaaggcagtagaaataaaaggttcggcatcgccaccatagaaactaatgctttatctaaattaatctcggctatgactgtactgactgagccataatgaccgacatctattttcagtcagatgcttgtgccaacgaaacgtgtcatatcatactttgtgcttgtcttcccctgacctgtcttataataggctcataactttatgcatatacaaacgtgaacttatttaacttaccattcagttaaatatttaatcctaactatagtctaaatagttaaatatagttcaagggctaagtagcctgttattttaaaaccgcaccatgtttacattcaatatatattcaatattaactctttgccaaaacaggtcttccctctatataaaggagatatacgtgctcttttcgcatgcgaatttccatcctgcacgtgaaaactgccacatccaccgaaactaaactaaaggtatttacccaaacgctatacatattcattacaatagtatctgcagtaaccttgtgatgaaacgtgtgccaacatgtgactactcttcaacagatattttttcttaccaaaaatgatctaagtacactcaatctgacacaatcttactaatgtaagatctgaggacaagatattcacgctcatctgcttgaaaacatcacttcattaactgtagagatggtacctacccaagtaaatctaaggggaacaactctgaattgaccaataaactgaagctaacataaaacattggacaaaagtgaaagaaaaatcagataggtcctttttccgacaactgatcaggcagacaaaatatgacctacattaatttttgtttaaatttcattttattcaatatacaatatgcacacttttctcatggcttacactgacagttgttttatacgttgtagtgaggccctgatagaaagtttagttatgcatgaagataatgtaaaattatgcataaattcctttaaagaaaatttacgaaataaagaaacggtattaagttctgatcttttagtcaaagttatttattgttcttaatggtgatacattggtttacacaaaatgtatgtattaaaatgtaaaatttctatatccaacaatgagaaataacaaacaaaaagttaaactagtatcacttttgtgtaacaaagtagctagattgcgtatatttatcacttaaatgaatcattttgaaagtgtttcttatgctttagtcatttggaagagtttctcttactgttcaggagtactttgcttcaaataatgtaacacaaaaattaattgtagtcgaatataattacaatgttccaaggtagtggttgtaattacttcatttaaggtggctcataggtaatgactctatgtaatgtattttaagcaattcaactttctctggatggaactatcacgatcattgctttaattgaaaaacgaataaatgctgaagaagcatatggagtttactttatttgatgattttcgatatatatactttaaagaagctataaggtgttttatttattgtttttaacaaagtgagcgagtaacttcagatatcaacattaatctataacctaaactgtttacacaacttggaaaagaaaaaagttcgttagggcctctcatttacaattatatcagcaattatcacctgaattgagtgcatttatgaatgggaaatattgatggtaaaatagtgtaggggtttgtttacattattaaatctttaataacttctttcaggtaaatttttggtatggttttggcaagcttatgataaacagcatgtcattctctttcactcagaatttttttcaagcgttttagactcttggctagtcttggattttgactttgttaaaagacaaaaggaagttcagtataggctctttcagatagctgaaagtagactaaacttacactatactgtattgaatttatttagctgtggaaacttttgatatagactataattggggaaatcctaaaatcattataaaacggtcaatacaagagttgtccattttgcttcagatattttgaaaaagtcgttttttaaatatcaaataattctatttttacatggagaagaggaaaaccataaatatatttagaaaattggtgcacttagctatcatttcactctgaaaaaaatatgtaaagatgaatttgaattttttaggtaccatctctattaactgtaataaaatatttacaggtcttcaagaagcttaccgatattcaaaatttatattttcaagacttcatttatgtatgattacatctgcgtttttattggctccatttaaatttcatttgtgcatacatggtatttacagtttatatgcacttatatacatttcagtgtggagtgcgctgtggataattgtattcttcgaatgatagtcttttgtctaaatgaaaatgcttttcctgggtttcaattaaatatgggttttagatgtaatatataatcattctttcgcttacgaaaccttgattggcttagaggaattccatcggctgtcctaagatcgtatgcagatgattttaattaaactgttcatttttaagagccttaagtttgtgaactattttataagtaaactcaaaataaacacaagaagtagggttccattgtcattgataatactacaaataaggcaaagtttccttgaccccatcaattatatagataagtgctagtgagtcaataactttgcaagaccttgactatagtatattatctattacggctgcgaactaataatggcaactattctgcagtttcatgaaaatcaaatagaaaatgtcgtccctagggtgttattacattattttaagtatttcaacatccaagacgacccagttacaaacttgatcttggctgtactaagacaaacattctggtcatatttcatgacgatcacgtaggaaatatttatttagttgttaatgcaaacaggtacttgtttcacatttacgtgacaaaacttttgcgttcgaagttcgtaaaatatttcccacgctaaacgtacgaaacatttgcgaagttggtacactgtcgtacgaattcagtgcgaatgttgacgaaattagttcatacgaacatttttacagaaggtgaccaggactatccatgtgataaacctttagacaacctttagttatcaggttacagcacatgtgacacagaaggcacaaatgaaaaagtattatacaggcgatatatccatgtaagaagtgttccaaagagggtacgtctcacggctgaagtgtccattttaaaaagtagaattatatttattcggtgactactatagatacccaccaggattatggcgtctatttaatttttagcagtaaattaagaaacaaacaaaagtgttctcctttaaaacaaaagatatacaaaattaactatgagtagatggaaaagaaatcgttttgtagtgatactttgatcggttcgaattttgcatccctccaaaatatatttgctttttattttgcattacataccttgtgtaagttttttttctccgctcacacattctttcgtttttcctttgtatcaaataggcagaatctttacttaattttgcaagtttgtatcaaatcaaaccatacatgaagtctctataatagcatattttggccctttaaggggccataacacaggaacccataacgggatctggccagtttttaaaaggaattgagatattatgccagtacatgttgtgtgcaagtttgattaaaatcaattgtaaaatgcggtccctatcgtgttcacaagccaaagtagcaaagcttggcctttaaggggccataactctggaaaacatgatgggatctgaccagttttcgaaaggaaccgagattttatgccaatacaagtgcaagtttaaataaaatcgattgcaaaatggggtctctatcgcgtttacaagaaattgtggacggacgacgacggacgacggacgaagggcgatcacaaaagctcaccttgtcactacgtggcaagtgagctaatacctatcgtacgaaattttgtgaaacaggcccaaggtttctattacttattattggacgattagttttaatactctcggcatagtccgaaaattttaaaactgacagggtttcaaatcaagattcgctttgtaaagtagcaagactttagtatgcataatgcccagagtttattacatactcatttgtaaactcagtcaagttacagtggatcctgaaacgtcaatatttttccatactgacgttcaaatttcatgtcggatgcgtgacgtcatttgtgacgtcagtttcatgcattccgtcgcgtttaaaagttctttaacgacattattttcaattttacttagactgaagaacaaattgtatcatttatataataagtataagtgaagtatatgtatgtaataacaagagctgccactattggaggcaaatgctcccgaagcgtgcccaagaaagctacagttatatgcgcaaaaaatcacacatcatttcgtgaccttgacctagacccgagagatccgggtcataaacgtgacacaccttctcaatatggttaatatttgtgacaaattatttttaaatcccttgataaatggcagagttatggaccagagaaaaaacacatttgacttctaagtgtgcccttgaccttggagttaggggtctgggttttgcgcgtgacacgtcatctcaatattgggaacatttatgccaagtaattttaaaatcccttcatcaatgacagagttaaagaccgtacaagaaataggtcatgttaacctataagctctaagtgaaccttcaacctctaagtgtgaccttgaccttagagctagggctctggatcttgcgcatgacacttcgtctcattatgccaagttatttcaaaatctcttcatcaatggcagagttatggaccggacacgaaacagaccctgttaacatttgacctttaagtgtgtctttgaccttggagctagggggtctggtcttgtgcatgacataccgtctcactatggtaaacatttatgccaagtcatttcaaaattggatgacagagatatggaccagacacgaaacagaccttgttaacctttgacctctaagtgtgagcttgaccttggagctaggggtctgggtcttgcgcaagacacatcgtctcattatggtgaatattacgtcaagttatttcaaaatgagagttagagcccgaacaagaatttacacgtacgcacggacgcacggacggacagtgctattttaatatagccaccttcggtggcataaaaagattattagatttgcatcgagatatttgcactcgcgcttttgcggaatgatattgcgctcctaaagtcactgcagaaactcgttcatatttctcgatacagatctaataacctataaatactggataacacgaatcttttcgcgcttaccatttaacatgtttaataactagtatgcgaaaactcgaatctaaatggatgtatgtagggggaaacttaactggtggcactggcttttatttgtgttgaaatatttatcctacttggaaaaaaaaatcgcaagcattaactag
